United States Patent Application Publication US 2007/0042382 A1 - sequence listing, part 10

SEQ ID NO: 41339 - DNA, 201 bp, Homo sapiens
gttcattattattgttacctagagattttttaataagcatataaaattaagaacaaatggtttgtcttaaagaaaaacttattagtgaggttaggagttartataaaataagactgtgcaaaatgacttttatctcatgttccccctttcagttatcttaaattaataggggttatcttgcattttcagctgttgttgatg

SEQ ID NO: 41340 - DNA, 201 bp, Homo sapiens
ttaaaaatgcccttggcataaggcagcatggtgtggcagttaagagatgggctgtgcagcccatcctgagctccagtcctgagtttgctacttacttctgkggcctctggaaccttatccaacctcttggtgcttcagtttcctcatctgtgaaattagaatttataataattgcacctacctcccaggggtaactaaatg

SEQ ID NO: 41341 - DNA, 201 bp, Homo sapiens
caaactcagggctgatctggatttccaatgatataatttgagtgttagtagacagcatcctttgctgaagatgtacttcacactgccccttctcaagtctyccatgtaagtttctgggggaaaaaatggatccagagaaaggtagtcagtagcagttttccccctcacaccgaaattgcctcctgccctttgtctttgaat

SEQ ID NO: 41342 - DNA, 201 bp, Homo sapiens
cccatgacagtttttaaagttcttgctcttctgaatcaagcggaggcagagcagggtttgcacatcaatgaatcaatctctttaataaaaataaaggaaaatattgtaactggttactaaagggaagatgggtgatatttgcaaagtttctgtagcattataaaatacctttacacttttattccatagaaattatactca

SEQ ID NO: 41343 - DNA, 201 bp, Homo sapiens
aacatgaaatttgaaacattttctctttaaaatcttcatttaaaaaatactgtattgttttccaattccagatcaccttttttttgttgttgttgttgttktttttttgagatggaatttcgctcttgttacccaggctggagtgcaatggcgcgatctccactcactgcaacctccgcctcctgcctcagcttcccgagt

SEQ ID NO: 41344 - DNA, 201 bp, Homo sapiens
caagattcacttttgctccagctccccaaaagttcctcatctccatctgagaccacctcagcctggactttattgtccataacattatcagcattttggtyaaagccatttaacaagtctttaggaagttccaaacttttccatattttcttatcttcttcaaactgttccaactgttccaaactgccctccaaactgttc

SEQ ID NO: 41345 - DNA, 201 bp, Homo sapiens
agactctgttgtatcagagaaataaattattagggatttcttccagaagaaaaacttcattgccttgaaattttattaattttatatggctgaaagttctragaattggttactatattaaggattataaaaatcttctaggttgtttttttaaaaatctgtgtgccagaagatttttaaaccttcataagataggcacac

SEQ ID NO: 41346 - DNA, 201 bp, Homo sapiens
aaaatgaatgagctagcccccagagagctatcccattttccttaaaaacaaatgaataaggtcctttaagcaagaaataaccacgtaagtcaacaatcgayagtgagaaaacaaactaatgagcttccaatagtctcttctcttgggctctgttctttgtgcttcacggttctctgaaactttggggaaagggagagggca

SEQ ID NO: 41347 - DNA, 201 bp, Homo sapiens
ccaaaatagtctccttcaactccatgtctcatatccaggtcacgctgctgcaagaggtaggatcccatggccttgggcagctatgctcctgtggctttgcmgggtacatctttcttcctggtttctttcatgggctggtgttgagtttctgggctttttcaagtgcatggtgcaagctgtcagtgaatctatcatcctggg

SEQ ID NO: 41348 - DNA, 201 bp, Homo sapiens
aatctggaatctgtgttcttaccttctgcagggcttgtcgcctgtggtcttccacccctgtgtgattgcctgtgctgtggtccactcacttgtgagggagyggggctcaaatctttgttggaccatcacctggccaggctttcctggggcctgctcaccaccggatcacctctcctttcttagaacagggcaggactgtcc

SEQ ID NO: 41349 - DNA, 201 bp, Homo sapiens
acttttaccaggaaaaaacgtaaggctcaactgctctgctttgctgaatgaagaggatgtaatttattggatgttcggggaagaaaatggatcggatcctratatacatgaagagaaagaaatgagaattatgtatgtatgtgtaatatatatgtcatgatatataccatataacaatcatatatattatatataacatca

SEQ ID NO: 41350 - DNA, 201 bp, Homo sapiens
taatttcctttataattttcctttatgtttgaatatagagaataaaaacattaccattagttttcaaattcctttttttgaatactttactctgtcaattstcaagtcccctaaaccttttaaaacctgaatttaaaatatattgtaataaaattagcatatttatattaaaagaattgcttaaaataaggaatttgaaag

SEQ ID NO: 41351 - DNA, 201 bp, Homo sapiens
gtaagcctgaaatttttaccaacatttttcatctttcaatgcatgcaattctgcaaagcaattgctttaaatcaacaataggttctaacccaaattgctgracagaatgctgtaagtagaactgaagaagattttgccagaagcagaaagtgttgtttggtgaccatgagtgctatggaggatgccaggctgggctgttaa

SEQ ID NO: 41352 - DNA, 201 bp, Homo sapiens
ctggacaggcctgagagagcacgttgagaggaacagccaggcatctatgatcatcacttggagataacagaagcaaatggcattggccatctttctgataygggtagtagagaatacagcctggcttaggaagcaacaatggaagcaagagattgaggcaggatgtcagagagaggtgtggagagacagggtagcagatag

SEQ ID NO: 41353 - DNA, 201 bp, Homo sapiens
tacagccttgtcataattagtgggaaccactctgtggaaagaaccccaagttgttaggaagagagaagtagagaaaaataattgagagagaatattttctyatattttcaacttagcatcatgatcttccagccatttaaacttcaggtaattgacagcaccattcccaaatggcctcaggagggctgtttctgtcagttc

SEQ ID NO: 41354 - DNA, 201 bp, Homo sapiens
cacatgtagagaagcatactggagaagcatatccagagggcgaaagatatctctccattgtgcatctgcctcttttgacgttggaagacacatgtcttacyccccaaagggagcccagcactgggagccttcttgatgatctcaaaaataatagctattcaagaaaatcaccaagtgactgtgaaaccgtcagttcggaag

SEQ ID NO: 41355 - DNA, 201 bp, Homo sapiens
agttttgtatttctccctttggataatctctttctaatttttagaggggtagaaaaccacagtgaatttcttagaaatgcagcttaagctacaaaagcagrgaggtctttctttatagttgggtgcacacacctttgatatcatctgttttgtcctctcaatggcctcctgtgttttacttctggatttcattggttttag

SEQ ID NO: 41356 - DNA, 201 bp, Homo sapiens
ggagtttgtctagataagtcttatgaatcaacatgtccaattgagtaatttctttcaaaagagaaaggaaagaaagaaaggaagaaattcacatatgctamatatgctaagccaggtatcatgctaggtcattgaaatatattgttgaattaaatcctccaagcaacactgaggcatgtattctcattttatgaattaaat

SEQ ID NO: 41357 - DNA, 201 bp, Homo sapiens
gcatggtttgactcttgcacgtttgatcatctgagagtcaggctgcagtggatgggcatcttcctctgccttttagttgaattgagcagaagctgcagatmtgagtgagagaaaaccagatacaaggtgctttcaacatctgtgacctttagttaatgcaaataggactcaagtgaacgtaaaccagtaactattggaatc

SEQ ID NO: 41358 - DNA, 201 bp, Homo sapiens
actgctctcagcatcctgcaagggaacggtgggcacatagagtgagggatttgcttttctcaacctgtcttggccctgcaacctgtaaatccatcactggycagctgaggaggacagatggagagaatcgagacagggcagaaaggctcttcccagtgattttgcatggtttgactcttgcacgtttgatcatctgagagt

SEQ ID NO: 41359 - DNA, 201 bp, Homo sapiens
cactgctctcagcatcctgcaagggaacggtgggcacatagagtgagggatttgcttttctcaacctgtcttggccctgcaacctgtaaatccatcactgkccagctgaggaggacagatggagagaatcgagacagggcagaaaggctcttcccagtgattttgcatggtttgactcttgcacgtttgatcatctgagag

SEQ ID NO: 41360 - DNA, 201 bp, Homo sapiens
agaactccgaatgctaggttgcagtaggatcaaagttcaatgcagatcttagttccactgggacacagtcaatgtaaaggaggggtctggagtgtaggagrctgtcacttcatctctccatttccctaaagtaaactcatatgggcagccacagacacacgcgaacacatgcatacacacctatgcctcagtgacacatgt

SEQ ID NO: 41361 - DNA, 201 bp, Homo sapiens
aagatgtacttcacactgccccttctcaagtctcccatgtaagtttctgggggaaaaaatggatccagagaaaggtagtcagtagcagttttccccctcayaccgaaattgcctcctgccctttgtctttgaattcaagccggtgttgcttcttactgtcagacctgagagttagttctttccctggatacatctcagctc

SEQ ID NO: 41362 - DNA, 201 bp, Homo sapiens
cctgcagcacaagctattcttctcccataattgtccatcttatttttcttgtcttcttggagaatgtcaactgagtctctcaggactccactcaaatgtcrctcctccttcatgcccccatggcctcttgtttgtatttctgattgctgtcagaattgcaatacatgtgtgtctctgtcaataacttgaaaggtttctgga

SEQ ID NO: 41363 - DNA, 201 bp, Homo sapiens
ttattaaaaacagaactgtaaaaagctactactggagaacaataaaaacccaacgataaagaagaacgccgagtttgaagatcaggggtattactcctgcrtgcatttccttcatcataatggaaaactatttaatatcaccaaaaccttcaatataacaatagtggaaggtaagggaaatcttagaattgggaagaaaca

SEQ ID NO: 41364 - DNA, 201 bp, Homo sapiens
tttcaaaacacaatcatgcccttctaacagtcccccaaagtcttcactcattccagcattaactctaaaatccaagtccaaagtctcatctgagacaaggmaggtcccttcctatgagtcagtaaattcaagagcaatttagttacttcctagatacaatgggagtacaggcattgagtaaatacaccccttccaaatggg

SEQ ID NO: 41365 - DNA, 201 bp, Homo sapiens
gtggaaactttaaagacctataagagagtggtctgaacagaacttgggaaatctgaagcgagtgatgataatatccttgaaatttttgtttgtgccttatkcttgaacactgtttacttgtgatttccaaagacagctcttatctgaaatgttttctaaacactcgaatcagtcctgagttgactttattctatttcccat

SEQ ID NO: 41366 - DNA, 201 bp, Homo sapiens
ctgcagggctggggaggcctcaggaaacttacaaaagggggaaaagccccttacaaaaccatcagatctcatgagaactcactcactatcatgagaacagmatgagggtgactgcccccatgattaaattcaagatgaggtttggatggggacacagccaaaccatatcagaatacttctatcacatcacttcctctttat

SEQ ID NO: 41367 - DNA, 201 bp, Homo sapiens
ttctcctgttcttgctcacatatctgcccactgcattctcaactgctcactctggcactgcactttctgagagggctcagggaggtgtgggagctgcaggwgcactcctgagtctcactgtactccactcaaccaggcattctgcttgctgagcacctgcaagtcccagaagggatgttctggacattgcttgggaatgcc

SEQ ID NO: 41368 - DNA, 201 bp, Homo sapiens
atggaagcaagagattgaggcaggatgtcagagagaggtgtggagagacagggtagcagataggagatgctaagaaaaatgaggtgtcccagagtggataytggagactgatcactatgagagtaaagtgttgaggagagaagcagctttgacaatggccttgaaaataaatgggattctacatggaagcaggttgtttta

SEQ ID NO: 41369 - DNA, 201 bp, Homo sapiens
acccaggagcatagaagatacagacatattcaaatatagcataattagtaagcagtatttactgcagatgtgtgtgtatacacatatgtgttctaacttargtgtgtaaccctttgtagtttgatgtgggatctatcagtgaacagactttacacctgaaaatttcccgttagaacagtaattctttaatttttaggagta

SEQ ID NO: 41370 - DNA, 201 bp, Homo sapiens
aaagtgcacccgagagtcactggagggtagattatgagaaagacccattaatgctgaacttgaagtaccacaagtgccgaaagaggggaacgagcacctaycctgggtagatgatggtcagatatatttccaaagccagagaatctgggtcaattgagaaagagggaaagtgacagatatgcaaatttggattgatattat

SEQ ID NO: 41371 - DNA, 201 bp, Homo sapiens
gacgaaccggaagtcttgcctgttctttccgagtcttaatcttcagaaacagtgaacgccaaaaagaactcaagatattctggggactgagcatatgaacytgttcataacaaaggctgtgactcgaaataattaactttgtcaaaatcctgctcacaatttgaagatgaaacttgtcattaggttggcgggaatgagact

SEQ ID NO: 41372 - DNA, 201 bp, Homo sapiens
tgtggactagttaatcctcactagtaactcttactagaaataaacacgggttaattattactagaaaatgcatgggtttttattgtgttgatattggtgaygaaatttaagtagaaaataggaaaattgaaaagggaaaaataacaggaaagcggtgatccccatcagatcatagctatgaaattcaatgttttttttatt

SEQ ID NO: 41373 - DNA, 201 bp, Homo sapiens
cgccatccctttcctccaccaaagtagcacagcccagggccttcagcccagtagctgctcagaaatggctgtgactggagccagaaagctgtgatttccakttgtcactactcattcactgttcattcccaggctccaccatcaactccctggatatgtagagaaaggtcaagatctgcaagagagagagaaagggagaga

SEQ ID NO: 41374 - DNA, 201 bp, Homo sapiens
aaaaaatgaatgagctagcccccagagagctatcccattttccttaaaaacaaatgaataaggtcctttaagcaagaaataaccacgtaagtcaacaatcratagtgagaaaacaaactaatgagcttccaatagtctcttctcttgggctctgttctttgtgcttcacggttctctgaaactttggggaaagggagaggg

SEQ ID NO: 41375 - DNA, 201 bp, Homo sapiens
catttccaacaagcattatggtaatcaacaaagcctctaatggtaaaccatgattagatatccaaagcttctagctgcctgaggaggggggtggtgtggastttcaattatcaacctcccacctctggagagtgtgtaattcacattaagtttcttcaaatggtaatacttccagagagcacatgtccatccaaacacagt

SEQ ID NO: 41376 - DNA, 201 bp, Homo sapiens
tatagcataattagtaagcagtatttactgcagatgtgtgtgtatacacatatgtgttctaacttaggtgtgtaaccctttgtagtttgatgtgggatctrtcagtgaacagactttacacctgaaaatttcccgttagaacagtaattctttaatttttaggagtacattgctaataatcaaatgccactgaggactgat

SEQ ID NO: 41377 - DNA, 201 bp, Homo sapiens
cagcctgcctcagcagggtaccaggctcagggtccttgtgtgtgctcattcattcattgcctcctgaacttggcaagcaggccattgatagccctgatctstgggctcttaaagtttttcagtgctcacctgatggagggccccagggtcgccatccctttcctccaccaaagtagcacagcccagggccttcagcccagt

SEQ ID NO: 41378 - DNA, 201 bp, Homo sapiens
tcttgctaaccttgcttcttcacctaatgcattaggagaccaaaaaaagttaccttgtcattttggtttttgtttttatttattttactttactaatcttytgaagaatcttgtacttcacgtccccacattactgtggttgaaggggaacctttctatctgaaacattgctcgtgttcacttgcacatgagattgaaaca

SEQ ID NO: 41379 - DNA, 201 bp, Homo sapiens
cctctctgcctcagattcctcatcatgaaatgggacagtaatggttcatccctcgtagggttggctgacaatgactgagtgagtgtgtgtacagctctagratggctctagggacagtaagagttctgctgtaatgaccatctcccactgctaggttcccaaacctcacctgcagcacaagctattcttctcccataattg

SEQ ID NO: 41380 - DNA, 201 bp, Homo sapiens
gctgtaggaatatccattattaaaagggtgcttgttatgggccagggatagtgccaagtactggagttgaatcatgtcatataatcctcacaacagctctrtgagactgtggccttgggtgagttaatttccttagttcctctctgcctcagattcctcatcatgaaatgggacagtaatggttcatccctcgtagggttg

SEQ ID NO: 41381 - DNA, 201 bp, Homo sapiens
aaccaaaaaagagtgagattgtcagtgtaagaatgtgatttaatgtttgtagtgcttacaattttgtgtaccaactggatgactaaaaagagtaaaataayttaattaatagctcatattttatgtgtgaaaacatgttagtgaacatatataatcaaaatagatttcattgctattgcatagtctctaatacatagaatg

SEQ ID NO: 41382 - DNA, 201 bp, Homo sapiens
aaataaggaatttgaaagcaattaatagttgaaaagctaatttttcataggtaagagcaaagctatattgtatgtaatataaacccatatttgatgaaatygtcttcccagtttgttgcaatccattacatcataagaaaattatgccctttaaaaaagtgtgctcatttaattgtcttacatgttgatgcctgttttgtc

SEQ ID NO: 41383 - DNA, 201 bp, Homo sapiens; identical to SEQ ID NO: 29252

SEQ ID NO: 41384 - DNA, 201 bp, Homo sapiens; identical to SEQ ID NO: 29387

SEQ ID NO: 41385 - DNA, 201 bp, Homo sapiens; identical to SEQ ID NO: 29253

SEQ ID NO: 41386 - DNA, 201 bp, Homo sapiens; identical to SEQ ID NO: 29373

SEQ ID NO: 41387 - DNA, 201 bp, Homo sapiens; identical to SEQ ID NO: 29439

SEQ ID NO: 41388 - DNA, 201 bp, Homo sapiens
tgaggcaggagaatggcttgaacccagaaggtggagcttgcagtgagctgagatcatgccactgcactccagcctgggcgacagagcgagactccatctcaaaaaaaaaaaaaaaaatttaaaaattagcagggtgccgtagtgtgcacctgcagttccacctacttgagaggctgaagtgggaggattactgctgccttg

SEQ ID NO: 41389 - DNA, 201 bp, Homo sapiens
ggaatttacaggcgcgtgccaccacgccagctaattttgtatttttagtagaggcggggtttcaccatgttcgccaggttggtctgggactcctggcctcragtgatctgctcgcctcccaaagtgctgggattataggcgtgagccacactttgccttctttgcaccagggagaattatattttttctcattttttattt

SEQ ID NO: 41390 - DNA, 201 bp, Homo sapiens
cctggcctcaggtgatccgcctgcctcgacctcccaaagtgctgggactacaggcatgagttgccgcgtgcagccctgcagtcctgttttttttttttttkgggcggagtttcactcttgttacccaggctggagtgcaatggcgcgatctcagctcaccgcaacctctgcctcctgggttcaagcagttctcctgccttg

SEQ ID NO: 41391 - DNA, 201 bp, Homo sapiens
ggagcagaaagcaaattgggactcttcgaagggggcctgatgttgtggggaaactgcgtgcaaatccagctctctgctctgacccctcccaggggaatttrcctgtgtggacactcagccggggcccacctggctgccatgatgctcctggccgactggaccaagcatggggtcacgcccaacctcagaggtttccatggg

SEQ ID NO: 41392 - DNA, 201 bp, Homo sapiens
ggagagtctcactctgttgcccaggctggagggcagtggtgctatgtcatctcactgcaacctccacctcctgggttcaagcagttcttgtgcctcagctkcccgaatagctgggattgcagatgtgcaccaccacgcccggctaatttttgtgtttttagtagagacagggtttcgccatgttggccaggctggtctcaa

SEQ ID NO: 41393 - DNA, 201 bp, Homo sapiens
gctgggattgcaggttcccggttggtatttccttatttggaaagaccatctttgtaggtgttattagctaaagtcaagtcattctgggttagggtgggccmtaaatgccattgactgctatcctgctaagagacagaagagggagggacacacagggaggggaccacgtgaagacggaggcagagacgggaagaggcagag

SEQ ID NO: 41394 - DNA, 201 bp, Homo sapiens
aattgccttgcacagtggctcacacctataatcccacacattgggaggctgaggcaggaggattgagttagaaaccagcctggtcaacatagcaagacccycatctctacaaaagaaaagataaatttgctgggcatagtggtgcacacctatactcctgcttgggaggctgaggcaggaggatcgcttgagcccaggagg

SEQ ID NO: 41395 - DNA, 201 bp, Homo sapiens
cattgcactccagcctgggcgacagagcgaggccctatcgcttagaaaacaaaaagttacatgaagttcccccaaggtcccgtagctagcatgtgatgtgkcagggagagagcctgtccgcttcactctctcacatgggaccagaaaggggtgatgctgtgcgtggacaggacatctggcaagtggtgtgtccaggacaca

SEQ ID NO: 41396 - DNA, 201 bp, Homo sapiens
tgagatcatgccactgcactccagcctgggcgatagagcgagactcagtttcaaataaataaataaacatcaaaataaaaagttactgtattaaagaatgrgggcggggtgggaggggtggggagaggttgcaaaaataaataaataaataaataaaccccaaaatgaaaaagacagtggaggcaccaggcctgcgtgggg

SEQ ID NO: 41397 - DNA, 201 bp, Homo sapiens
agatcttggctcactgcaagctccgcctcccaggttcacgccattctcctgcctcagccacccaagtagctggtactacaggcgcccaccaccatgcccasctaattttttgaatagagacggggtttcaccgtgttagccaggatggtagcattagaaattatttctaacccaggctgggctccatggctcatccctgta

SEQ ID NO: 41398 - DNA, 201 bp, Homo sapiens; identical to SEQ ID NO: 29715

SEQ ID NO: 41399 - DNA, 201 bp, Homo sapiens; identical to SEQ ID NO: 29717

SEQ ID NO: 41400 - DNA, 201 bp, Homo sapiens
tagcttctcgtcagtacgtcagtacgcagggagccctgcaggggcaagtggttggtaacgtgggtgctggcaaaacaggttttgcaacctcactggcgttstgcaaaggcagcttcctgcctggattggcccatgggcaacttccctttgatttccctcagctttaatccatccagctgaagtggagacagcccggtttat

SEQ ID NO: 41401 - DNA, 201 bp, Homo sapiens
tattattattattatttttgtttttgagacggagtcttgctctgtcacccaggctggagtgcagtggcaagatcttggctcactgcaagctccgcctcccrggttcacgccattctcctgcctcagccacccaagtagctggtactacaggcgcccaccaccatgcccagctaattttttgaatagagacggggtttcacc

SEQ ID NO: 41402 - DNA, 201 bp, Homo sapiens; identical to SEQ ID NO: 29721

SEQ ID NO: 41403 - DNA, 201 bp, Homo sapiens
gacatttacttccccgacgagtcgtctgaaggttgtcggtgaaggggctgggggtcccggggcttgggggtccagtggcagagctcagcagggcgggcctygctcacacgccctgtgcttggttttgcagccttgcctttcttcctgttctttcacggaggatactggcagagcggaaggtgagtcgggggatgtggatgg

SEQ ID NO: 41404 - DNA, 201 bp, Homo sapiens
ccgtagtacacacagttccaccctgccagtttcacttagtatttcttggagatgtttcctcatctgtacgtagatagcttctcgtcagtacgtcagtacgyagggagccctgcaggggcaagtggttggtaacgtgggtgctggcaaaacaggttttgcaacctcactggcgttctgcaaaggcagcttcctgcctggatt

SEQ ID NO: 41405 - DNA, 201 bp, Homo sapiens
tacgataaagtttaatttataaattggcaaagggtatataaatattccttctaagagattaacaataactaataaagtagaacgattaaaacaatatactrtgatcaaagttatgtgaagccaggtgctgtggctcatgcctgtaatcccagcactttgggaggctgagacaggtggatcacctgaggtcaggagttggag

SEQ ID NO: 41406 - DNA, 201 bp, Homo sapiens
ataaatattccttctaagagattaacaataactaataaagtagaacgattaaaacaatatactgtgatcaaagttatgtgaagccaggtgctgtggctcaygcctgtaatcccagcactttgggaggctgagacaggtggatcacctgaggtcaggagttggagaccagcctggccaacatgacaaaaccccgtctctact

SEQ ID NO: 41407 - DNA, 201 bp, Homo sapiens; identical to SEQ ID NO: 29733

SEQ ID NO: 41408 - DNA, 201 bp, Homo sapiens
agccccaccccaggcagcttgaaatcagagctggggtccaaagggaccacaccccgagggactgtgtgggggtcggggcacacaggccactgcttcccccygtctttctcagccattcctgaagtcagcctcactctgcttctcagggatttcaaatgtgcagagactctggcacttttgtagaagccccttctggtccta

SEQ ID NO: 41409 - DNA, 201 bp, Homo sapiens
tatgcgtctagacatgcggatatattcaagctgggcacagcacagcagccccaccccaggcagcttgaaatcagagctggggtccaaagggaccacacccygagggactgtgtgggggtcggggcacacaggccactgcttccccccgtctttctcagccattcctgaagtcagcctcactctgcttctcagggatttcaa

SEQ ID NO: 41410 - DNA, 201 bp, Homo sapiens
tgaccttgtggtccacccgcctcggcctcccaaagtgctgggattgcaggtgtgcgccgccgcgcccggccaggcttttttttctctaggcctgctgtggycaccaaggctggggaccagggggcctccagggacagggatcccaagttgcacgttaatacacggagccctttctgagatgcaggttctacagggaactgg

SEQ ID NO: 41411 - DNA, 201 bp, Homo sapiens
tggcccccttcccagagacaggggaggatcctccacccactccccagcctccaggaccatcctgactcctgccttcaggcactcaagttatgcgtctagayatgcggatatattcaagctgggcacagcacagcagccccaccccaggcagcttgaaatcagagctggggtccaaagggaccacaccccgagggactgtgt

SEQ ID NO: 41412 - DNA, 201 bp, Homo sapiens
agcaaagaatagccccctcctttcctggtgcaccttcagatgtgccgatggggcccaggctcgctgcagatggcccccttcccagagacaggggaggatcstccacccactccccagcctccaggaccatcctgactcctgccttcaggcactcaagttatgcgtctagacatgcggatatattcaagctgggcacagcac

SEQ ID NO: 41413 - DNA, 201 bp, Homo sapiens
tggggtttcaccatattggccagggtggtctcgaatgcctgaccttgtggtccacccgcctcggcctcccaaagtgctgggattgcaggtgtgcgccgccscgcccggccaggcttttttttctctaggcctgctgtggccaccaaggctggggaccagggggcctccagggacagggatcccaagttgcacgttaataca

SEQ ID NO: 41414 - DNA, 201 bp, Homo sapiens
atctctactaaaaatacaaaaattagcctggtgtggtggtgcatgcctttaatctcagctactcgggaggctgaggcaggagaatcgcttgaacccgtggyggggaggaggttgcagtgagctgagatcatgccactgcactccagcctgggcgatagagcgagactcagtttcaaataaataaataaacatcaaaataaa

SEQ ID NO: 41415 - DNA, 201 bp, Homo sapiens
atttttagtagaaatggggtttcatcatgttggtcaggctgatcttgaactcctgacctcgtgatcccgcctccgcctcccaaagtgctgggattacaggygtgagccaccgcgcccagcctctgtttttttttttctttttttaattctccaaactgcctcagaatggttccttgttactttctgcataaagtgtgaagg

SEQ ID NO: 41416 - DNA, 201 bp, Homo sapiens
gctggagtgcaatggcgcgatctcagctcaccgcaacctctgcctcctgggttcaagcagttctcctgccttggcctcccaagtagctgggattacaggcrtgcgccaccacgtccagctaattttgtatttttagtagagatggggtttctccatgttggtcaggctggtctggaactcccgacctcaggtcatctgccc

SEQ ID NO: 41417 - DNA, 201 bp, Homo sapiens
cagggtggtctcgaatgcctgaccttgtggtccacccgcctcggcctcccaaagtgctgggattgcaggtgtgcgccgccgcgcccggccaggcttttttytctctaggcctgctgtggccaccaaggctggggaccagggggcctccagggacagggatcccaagttgcacgttaatacacggagccctttctgagatgc

SEQ ID NO: 41418 - DNA, 201 bp, Homo sapiens
aggctggagtgcagtggcgcgatctgggctcactgcaacctcttcttccagggttcacgccattctccggcctcagcctcctgagtagctgggactacatgcgcccgcaaccatgcccggctaatttttttgtatttttagtagagatggggtttcactgtgttagccaggatggtctccaactcctgacctcatgatccg

SEQ ID NO: 41419 - DNA, 201 bp, Homo sapiens
ccaaagtgctgggattacaggtatgagccaccgtgcctggactttcaccttttctttctttaaagaaatctggacttgggaacctgtaaactagtgaagtmttaaggtccatttccatctctaccctgtatctgcaaagtgctgtaccacgatctgaacacctggtaatgcatccgtgctgggatggggagcaggccccga

SEQ ID NO: 41420 - DNA, 201 bp, Homo sapiens
aatggtgggatctcagctcgctgcaacctccacctcccgagttccagcgattctcctgcctcagcctcccgagtagctgagattacgggcgcccgccaccatgcccagctaatttttgtatttttagtagagacggagtttcaccatgttggccaggatggtctcgaactcctgacctcaggtgattcacccgcctcagcc

SEQ ID NO: 41421 - DNA, 201 bp, Homo sapiens
aaaaaatttaaaggccaggcgtggcagctcacgcatgtaatcccagcactttgcggggctgaggtgggcagatcacaaggtcaggagattgagaccatccyggctaacacggtgaaaccctgtctctactaaaaatacaaaaaattagctgggcgtggtgcgggcacctgtagtcccatctactctggagactgaggcagg

SEQ ID NO: 41422 - DNA, 201 bp, Homo sapiens
tattgaaacttcaagtcatatgaatgaaagaaaattaaaaggaaaggattaaaaaggaaaaaaaaaaaagaggccaggaactgtcacacacgcctgtaatsccagtactgtgggaggtcaaagcacgaggatcctttgaggccaggagtttgagaccagcctgggcaacatagcaataacctgcctctacaaaaaatttaa

SEQ ID NO: 41423 - DNA, 201 bp, Homo sapiens
gtggctcacatctgtaatcccagcactttgggaggccgaggcaggcagatcacttgaggtcaggagtttgagaccagcctggcaaacatggtgaaaccccrtctctactaaaaatacaaaaattagcctggtgtggtggtgcatgcctttaatctcagctactcgggaggctgaggcaggagaatcgcttgaacccgtggc

SEQ ID NO: 41424 - DNA, 201 bp, Homo sapiens
tctgcagccctggggcttatcagacaccaaccctgctggcaccttgatcttggacttccagtttgcagaactgtgagaaaataaaatttccattaagtttycccagtctggtattttgttatagccgcccaggctgactcagacaggagcccaggatggatgtgagcgtgttataaccagctcacgcttgtggctgtaggg

SEQ ID NO: 41425 - DNA, 201 bp, Homo sapiens
gggtttcccaagcaaggttccttggaagaagatgtctgcagaggtaggtggattgcagggagggactaaggggctggggcggagttagctcatttattagwttggaattccaagaaggaagcttagaagccgtctagagcactcctgtgggcatgcagagcgcctagtgcgtgccaggtccccagtgcttgagcaccatgg

SEQ ID NO: 41426 - DNA, 201 bp, Homo sapiens
aaaatgtggagataacggaggagatgatggatcaggcaaatgataaaaaagtggctgctattgaagtcctaaatgatggtgaactccagaaagccattgasttattcacagatgccatcaagctgaatcctcgcttggccattttgtatgcaaagagggccagtgtcttcgtcaaattacagaagccaaatgctgccatcc

SEQ ID NO: 41427 - DNA, 201 bp, Homo sapiens
tggctgctattgaagtcctaaatgatggtgaactccagaaagccattgacttattcacagatgccatcaagctgaatcctcgcttggccattttgtatgcmaagagggccagtgtcttcgtcaaattacagaagccaaatgctgccatccaagactgtgacagagccattgaaataaatcctgattcagctcagccttaca

SEQ ID NO: 41428 - DNA, 201 bp, Homo sapiens
acctagggcacagaaaattgcagaacattggagaaagtatgagcgaaaacatgaagagcgagagatcaaagaaagaatagaacgagttaagaaggctcaaraagagcaggagagagcccagagggaggaagaagccagacgacagtcaggagctcactatggcccttttccaggtggctttcctgggggaatgcctggtaa

SEQ ID NO: 41429 - DNA, 201 bp, Homo sapiens
atgttttttgacaattaatgtaaacatttcaagtaggctgagattttattgcatattaacaatgtccatgttcactcgcggcagccgcccccttctgcgcrgtcatgccgagccagcacctgggcctggaactgggccgcagcccccagcttcacccaccacctccctaccatggacccctgcaaagtgaacgagcttcgg

SEQ ID NO: 41430 - DNA, 201 bp, Homo sapiens
gtgggcccctgcctgcagcagcctcctgggcctccctccctcctacctaccctaactgctgctggctacccgccgcagaccgagcccttattctcatccaycctcccacccgcccctgcctgcagggtgcagctgctgggcaagaggcaagtgctgcaagaagcactgcaggggctgcaggtagcgctgtgcagccaggcc

SEQ ID NO: 41431 - DNA, 201 bp, Homo sapiens
ttaagagccacatctcaggaatcttccgccccaagttctcggtgagtggcgcccagcctgggcccccctactgttgtgtttcgagtttaatcactgggatstcctagagaggaggctctgcccaggctgcttgtattgggaagttcctctcttccctgggattccaggctgcagatgtccccagaccctgcccctgtgacc

SEQ ID NO: 41432 - DNA, 201 bp, Homo sapiens
aagaggagaacacccacccccgggagcggtgagtgggcccctgcctgcagcagcctcctgggcctccctccctcctacctaccctaactgctgctggctasccgccgcagaccgagcccttattctcatccaccctcccacccgcccctgcctgcagggtgcagctgctgggcaagaggcaagtgctgcaagaagcactgc

SEQ ID NO: 41433 - DNA, 201 bp, Homo sapiens
tgggtgagcagattggacgggtgagtgcgcctctgctggcctccttgtcgctggcgacttctcctgagtcgcgcctgggccccctgccctaccacccagaracctccctgccccatctgattccccacttgtaccccgactccctgcccagcccccaccacacaccatcctccaggaaacgggacagtacctaccctgaaa

SEQ ID NO: 41434 - DNA, 201 bp, Homo sapiens
gggagctccagctgaacgagctgactgtggagagcgtgcagcacacgtgggtggtggctttgcacctgggctgcggcggggctcccagcagaccacgagtktttatgtaggcagggctaggtcgtggagactgtccacacagagctgtcaccaggtggccgggcttgcttggctctacagggatgcactggacctgggttg

SEQ ID NO: 41435 - DNA, 201 bp, Homo sapiens
ccaggtggccgggcttgcttggctctacagggatgcactggacctgggttgagggggcaggagggctcggttctaatgctgcccttctcttgggtgcaggstgacctcagtgacagatgagctggctgtggccaccgagatggtgttcaggcggcaggagatggttacgcagctgcaacaggagctccggaatgaagagga

SEQ ID NO: 41436 - DNA, 201 bp, Homo sapiens
gaagctgggaggccagagagcaggctcttgccataatccagatccaagcttttggccactaggacggggaggtagcaatggaggtgaggcgcggtcaggtcctggaaggtgaagccagtgggatttccctatggattggaagtggggcgtgaaatagaggagtcaggggtcactctggggatttggcctggagcagctgga

SEQ ID NO: 41437 - DNA, 201 bp, Homo sapiens
accctggtggcggtgaagtcttgtcgagagacgctcccacctgacctcaaggccaagtttctacaggaagcgaggtgggtgataaactaatgatcaccacrggtcccgcatacacagaggttacactgcatggcacagtgtgaagtgcttgaccaccgtggtggtgtttagtcctcgaggccccccattgcgggtagtacc

SEQ ID NO: 41438 - DNA, 201 bp, Homo sapiens; identical to SEQ ID NO: 30361

SEQ ID NO: 41439 - DNA, 201 bp, Homo sapiens
gttaagtgactcctcctcgatcctcccttgcccagctccctccaccgctgcagctcattccggaggtgcagaagcccctgcatgagcagctgtggtaccayggggccatcccgagggcagaggtggctgagctgctggtgcactctggggacttcctggtgcgggagagccagggcaagcaggagtacgtgctgtcggtgc

SEQ ID NO: 41440 - DNA, 201 bp, Homo sapiens
ctgccgcccaggctagagtgcagtggcatgatctcggcttactgcaacctccgcctcccaggttcaagtgattcccctgcctcagcctcccgagtagctgraactacgggcatgcgccaccacacccagctaatttttgtatttttagtagagatggggtttcaccatgttgcccaggctagtctctaattcctgggctca

SEQ ID NO: 41441 - DNA, 201 bp, Homo sapiens
atccaccggtgagtgggcggtggccacgggccctgccaacacccccgaccagagtcaagaggtacctatacccctagggccccccgctggaccatcaggcrtcagctccagagggggagttggcctctgtggtagacaggggtgcccagggccgggagcagcttttgtccttggctttcctagagtgttcagccagggctg

SEQ ID NO: 41442 - DNA, 201 bp, Homo sapiens
gaggaagccgatggggtctatgcagcctcagggggcctcagacaagtccccgtgaagtggaccgcacctgaggcccttaactacggtacctagtccctgtmtaccctggactccatggccagaggccaggcctgggtcctgccggctgcctcgccctggccccagggagggtgcactcacgctgcctcacctcctcgcctc

SEQ ID NO: 41443 - DNA, 201 bp, Homo sapiens
actacggtacctagtccctgtctaccctggactccatggccagaggccaggcctgggtcctgccggctgcctcgccctggccccagggagggtgcactcaygctgcctcacctcctcgcctcctctgcaggccgctactcctccgaaagcgacgtgtggagctttggcatcttgctctgggagaccttcagcctgggggcc

SEQ ID NO: 41444 - DNA, 201 bp, Homo sapiens
agtgaggcaggggtcaaccccagccctgactccaaacccagggtcctaggcctgaactgcccagccttgcccagcctgaggctcccctgactggggatccygtctcgggggcaggaaggagatcctgcaggaatacctggagattagcagcctggtgcaggatgaggtggtggccattcaccgggagatggctgcagctgc

SEQ ID NO: 41445 - DNA, 201 bp, Homo sapiens
tgctggcctgtccactgacggggcgctgtcccccacaggtccgcacctgacgtcccaccctgtgtcacgttcgatgagtcactgcttgaggagggtgaacygctggagcctggggagctccagctgaacgagctgactgtggagagcgtgcagcacacgtgggtggtggctttgcacctgggctgcggcggggctcccagc

SEQ ID NO: 41446 - DNA, 201 bp, Homo sapiens; identical to SEQ ID NO: 30372

SEQ ID NO: 41447 - DNA, 201 bp, Homo sapiens
cccaggccaggctgctgctgggtacccatggctgcgtgtgagcgaggcaggaccccacctcctccccgtctgcagtccatcctgaccctacagtccccagyctcctcgtcccatgcctccgtctccagctgctgccttgcctccagggatggccccttttctgtccccagaacagcactatgggcttctcttctgagctgt

SEQ ID NO: 41448 - DNA, 201 bp, Homo sapiens
gcccggcctgctgcggtcactgcaggacctgcacgaggagatggcttgcatcctgtaagcccgcagccccgtcccctggcccccacccttgagcagccctmagcccagccatcaggcccagaggcaggacccagaaaatccattgctgggaaggtgctggccatgtaaccacatgagaacgggacctgggccaaggattgg

SEQ ID NO: 41449 - DNA, 201 bp, Homo sapiens
cgggtacctctagccccggggcctggaggagcggtgggagctgggggcgcggcaggcaggggcagagcaggcgttccgagggccagagacccacccaggtsggggtaggggccgcggaagggcggggatggccgcaggggcagggctcaggctgtgggcgcctgaggcttcagctggggcaggcttggcctgtcgaggacc

SEQ ID NO: 41450 - DNA, 201 bp, Homo sapiens
ggggcctgtggatggctctgcatgccactccatggttgtaagggctgagggcatataggggggagagagagacccccggctgcccccacggcctcttcaayaaggtggttaagtgactcctcctcgatcctcccttgcccagctccctccaccgctgcagctcattccggaggtgcagaagcccctgcatgagcagctgtg

SEQ ID NO: 41451 - DNA, 201 bp, Homo sapiens
agatggctgcagctgctgcccgcatccagcctgaggctgagtaccaaggcttcctgcgacagtatgggtaagccccgtccttgctcctgctgggcccaggkctgctggcctgtccactgacggggcgctgtcccccacaggtccgcacctgacgtcccaccctgtgtcacgttcgatgagtcactgcttgaggagggtgaa

SEQ ID NO: 41452 - DNA, 201 bp, Homo sapiens
ggccctgccaacacccccgaccagagtcaagaggtacctatacccctagggccccccgctggaccatcaggcatcagctccagagggggagttggcctctstggtagacaggggtgcccagggccgggagcagcttttgtccttggctttcctagagtgttcagccagggctgggcaggcgactgttggccaaatgagccc

SEQ ID NO: 41453 - DNA, 201 bp, Homo sapiens
ctgcacgaggagatggcttgcatcctgtaagcccgcagccccgtcccctggcccccacccttgagcagccctaagcccagccatcaggcccagaggcaggwcccagaaaatccattgctgggaaggtgctggccatgtaaccacatgagaacgggacctgggccaaggattggaaacaggcaacttacctctgaattacac

SEQ ID NO: 41454 - DNA, 201 bp, Homo sapiens
tcttcagacttctgatcccctgtctcctctcttccccaggacaagtgggtgctgaaccatgaggacctggtgttgggtgagcagattggacgggtgagtgygcctctgctggcctccttgtcgctggcgacttctcctgagtcgcgcctgggccccctgccctaccacccagagacctccctgccccatctgattccccac

SEQ ID NO: 41455 - DNA, 201 bp, Homo sapiens
tgcctggtgacagagaagaatgtcctgaagatcagtgactttgggatgtcccgagaggaagccgatggggtctatgcagcctcagggggcctcagacaagyccccgtgaagtggaccgcacctgaggcccttaactacggtacctagtccctgtctaccctggactccatggccagaggccaggcctgggtcctgccggct

SEQ ID NO: 41456 - DNA, 201 bp, Homo sapiens
tgcgggactgggaaggccgtggtaggagcccaagaccgtttcaggggaactttggcgaagtgttcagcggacgcctgcgagccgacaacaccctggtggcrgtgaagtcttgtcgagagacgctcccacctgacctcaaggccaagtttctacaggaagcgaggtgggtgataaactaatgatcaccacgggtcccgcata

SEQ ID NO: 41457 - DNA, 201 bp, Homo sapiens
caagtccccgtgaagtggaccgcacctgaggcccttaactacggtacctagtccctgtctaccctggactccatggccagaggccaggcctgggtcctgcyggctgcctcgccctggccccagggagggtgcactcacgctgcctcacctcctcgcctcctctgcaggccgctactcctccgaaagcgacgtgtggagctt

SEQ ID NO: 41458 - DNA, 201 bp, Homo sapiens
ctcccaggttcaagtgattcccctgcctcagcctcccgagtagctggaactacgggcatgcgccaccacacccagctaatttttgtatttttagtagagayggggtttcaccatgttgcccaggctagtctctaattcctgggctcaaagcgatttgcctgcctctgcctcccaaagtgccgggattacaggcatgagcca

SEQ ID NO: 41459 - DNA, 201 bp, Homo sapiens; identical to SEQ ID NO: 30385

SEQ ID NO: 41460 - DNA, 201 bp, Homo sapiens
agccccgtccttgctcctgctgggcccagggctgctggcctgtccactgacggggcgctgtcccccacaggtccgcacctgacgtcccaccctgtgtcacrttcgatgagtcactgcttgaggagggtgaaccgctggagcctggggagctccagctgaacgagctgactgtggagagcgtgcagcacacgtgggtggtgg

SEQ ID NO: 41461 - DNA, 201 bp, Homo sapiens
gaagccgatggggtctatgcagcctcagggggcctcagacaagtccccgtgaagtggaccgcacctgaggcccttaactacggtacctagtccctgtctascctggactccatggccagaggccaggcctgggtcctgccggctgcctcgccctggccccagggagggtgcactcacgctgcctcacctcctcgcctcctc

SEQ ID NO: 41462 - DNA, 201 bp, Homo sapiens
ggtgggtctctatgggactctggtgggtgctggcgtatctgccttctccttcctctcctgggggccctctggggcagtggctggagatctggcaggccaakgcttgggagccattgtgcccccctccctgcctcccccatctgtgctgtatagtcctgggctgagatcaccagccaaactgagggcctgagccgcttgctg

SEQ ID NO: 41463 - DNA, 201 bp, Homo sapiens
ccctgctactcgggaggctgaggtgggaggatcactggagcccgggaggtggaggttgcagtgagctgagatcatgccactgcaccccaacctgggtgacagagagagagagagaccttgactcgaaaaagaaaaaaacctgggcgcagtggctcacgcctgtaatttcaacattttgggaggctgaggaaggtggatcac

SEQ ID NO: 41464 - DNA, 201 bp, Homo sapiens
tggagcagctggaagatggagtggctgttaacttatgtagggaaggctgtgggaagaagaggtttaggagacaaggatagcagttcatttatttatttatktatttatttatttatttatttatttatttagagatgtagtctcattctttcgccaggctggagtgcagtggcgcgatcttggctcactgcaacctccacc

SEQ ID NO: 41465 - DNA, 201 bp, Homo sapiens
cagggagaggaatgagggtcagtctgtttgccttcgacctatgcagcctcctctcagggcccgagactgggcagcagcatggccccccgaaggtcgaggaytcgggccgtgaagtcagcctgcctaggtttgaatcccacccagctcctccgtctagaggctgtgtgatttggaactatttatctgggagcctagtgcccc

SEQ ID NO: 41466 - DNA, 201 bp, Homo sapiens
cccctggtggccaccctggccccattcctcgccccaaaagatcatctgattcaagggtgggcccatttttataaagttttgctggaacacagctatgcccytttgttttcatattgtctgtgactacaatgacagagttgagtaattgtgacagaggctctatggcctacaagcctaaaatatttatttactatctggccc

SEQ ID NO: 41467 - DNA, 201 bp, Homo sapiens
gccttggaggccaagctcttctcccatcatccctggggggccctggggaggcgggcctggccacgtagatcctgagcagcagtgccctccaggatcctgamgcagtacagccaccccaacatcgtgcgtctcattggtgtctgcacccagaagcagcccatctacatcgtcatggagcttgtgcagggtgagcgcggggcg

SEQ ID NO: 41468 - DNA, 201 bp, Homo sapiens
cctgccctgtctcacccagggacctggctgctcggaactgcctggtgacagagaagaatgtcctgaagatcagtgactttgggatgtcccgagaggaagcygatggggtctatgcagcctcagggggcctcagacaagtccccgtgaagtggaccgcacctgaggcccttaactacggtacctagtccctgtctaccctgg

SEQ ID NO: 41469 - DNA, 201 bp, Homo sapiens
agttttgctggaacacagctatgcccctttgttttcatattgtctgtgactacaatgacagagttgagtaattgtgacagaggctctatggcctacaagcstaaaatatttatttactatctggccctttaagaaaaagactgatctagtcgaggaatctagctcagttacagatggggaaactgaggttgggcgcttgcc

SEQ ID NO: 41470 - DNA, 201 bp, Homo sapiens
gggatttccctatggattggaagtggggcgtgaaatagaggagtcaggggtcactctggggatttggcctggagcagctggaagatggagtggctgttaayttatgtagggaaggctgtgggaagaagaggtttaggagacaaggatagcagttcatttatttatttatttatttatttatttatttatttatttatttag

SEQ ID NO: 41471 - DNA, 201 bp, Homo sapiens
cccttctacatgtggagccccgtgtgactgcacaggccgtgcacacctgcaactggccctgcctgccaccaggctaccactgtcagtccaaggagggaccrttgtagcctgtagtctacctctttgcctccccaaggggtctgtctttaacaggctctctgatctttgactctcacgtcagcagccagctttcccagaagt

SEQ ID NO: 41472 - DNA, 201 bp, Homo sapiens
gatttccctatggattggaagtggggcgtgaaatagaggagtcaggggtcactctggggatttggcctggagcagctggaagatggagtggctgttaactyatgtagggaaggctgtgggaagaagaggtttaggagacaaggatagcagttcatttatttatttatttatttatttatttatttatttatttatttagag

SEQ ID NO: 41473 - DNA, 201 bp, Homo sapiens
tcagggccactcctatgccatgggctgtacacaccaggttggtgcttacctggtcagggcacctgcctggaccccgtagtcatctcagtgtgctccccacrtggtcccacccctggtcacatatggaggcgccaaaaaatggaggacacagcccttctaagggcccagcaccccttttcttcagacttctgatcccctgtc

SEQ ID NO: 41474 - DNA, 201 bp, Homo sapiens
gtcactgcttgaggagggtgaaccgctggagcctggggagctccagctgaacgagctgactgtggagagcgtgcagcacacgtgggtggtggctttgcacytgggctgcggcggggctcccagcagaccacgagtgtttatgtaggcagggctaggtcgtggagactgtccacacagagctgtcaccaggtggccgggctt

SEQ ID NO: 41475 - DNA, 201 bp, Homo sapiens
ggtgaaccgctggagcctggggagctccagctgaacgagctgactgtggagagcgtgcagcacacgtgggtggtggctttgcacctgggctgcggcggggmtcccagcagaccacgagtgtttatgtaggcagggctaggtcgtggagactgtccacacagagctgtcaccaggtggccgggcttgcttggctctacaggg

SEQ ID NO: 41476 - DNA, 201 bp, Homo sapiens
tggccgggcttgcttggctctacagggatgcactggacctgggttgagggggcaggagggctcggttctaatgctgcccttctcttgggtgcaggctgacytcagtgacagatgagctggctgtggccaccgagatggtgttcaggcggcaggagatggttacgcagctgcaacaggagctccggaatgaagaggagaaca

SEQ ID NO: 41477 - DNA, 201 bp, Homo sapiens; identical to SEQ ID NO: 30391

SEQ ID NO: 41478 - DNA, 201 bp, Homo sapiens
atacacagaggttacactgcatggcacagtgtgaagtgcttgaccaccgtggtggtgtttagtcctcgaggccccccattgcgggtagtacccccttatartgccgaagggtagaggctgccccaggtcacacgtccgggtctgctggccttggaggccaagctcttctcccatcatccctggggggccctggggaggcgg

SEQ ID NO: 41479 - DNA, 201 bp, Homo sapiens
agtgcccaagccaagcgcaagtaccaggaggccagcaaaggttcgtggcttcccttgctggcagggagggaatccgaagccagtgctgacctgtccttggrtacccagagagtgggggctgcctgggcctccatgctgtcatctataccccttgccccccttctggcagacaaggaccgtgacaaggccaaggacaagtat

SEQ ID NO: 41480 - DNA, 201 bp, Homo sapiens
ttacattcattgagcactgttctgggctctggattataccagagaacgatggtagacaaaaacatctgtcctcagggatctttcgtgttagtggagtgagratgtgaggagcactaagagccatggagaaaaataaagcaagagaagtggatcgggacctgggagcacggaggcaagggaggaggtgacagttgtccatag

SEQ ID NO: 41481 - DNA, 201 bp, Homo sapiens
ggtaagcaccctgtgatgacagcagcctcaggctgcaccctcttccagatgctccagccggactcttctaactcccttaatgccaaccttcccaccaggcwgaataagaataacctggccagttgctcacgcctgtcatcccagcactttgggaggctgagctgggtggatcacttgagcccaggagttcaagatcagctt

SEQ ID NO: 41482 - DNA, 201 bp, Homo sapiens
tggcagggagggaatccgaagccagtgctgacctgtccttgggtacccagagagtgggggctgcctgggcctccatgctgtcatctataccccttgccccscttctggcagacaaggaccgtgacaaggccaaggacaagtatgtgcgcagcctgtggaagctctttgctcaccacaaccgctatgtgctgggcgtgcggg

SEQ ID NO: 41483 - DNA, 201 bp, Homo sapiens
acaccaccagcaccaccaccagctcctgctgcccggcctgctgcggtcactgcaggacctgcacgaggagatggcttgcatcctgtaagcccgcagccccrtcccctggcccccacccttgagcagccctaagcccagccatcaggcccagaggcaggacccagaaaatccattgctgggaaggtgctggccatgtaacca

SEQ ID NO: 41484 - DNA, 201 bp, Homo sapiens
tgcaactggccctgcctgccaccaggctaccactgtcagtccaaggagggaccgttgtagcctgtagtctacctctttgcctccccaaggggtctgtcttyaacaggctctctgatctttgactctcacgtcagcagccagctttcccagaagtctccaggtgctccttgcctgacgacaggacctttccagggcttcacc

SEQ ID NO: 41485 - DNA, 201 bp, Homo sapiens
ctctcagggcccgagactgggcagcagcatggccccccgaaggtcgaggactcgggccgtgaagtcagcctgcctaggtttgaatcccacccagctcctcmgtctagaggctgtgtgatttggaactatttatctgggagcctagtgcccccattcagtgtgctggtcaccctccctgcaccacaccccttcctcaagtgc

SEQ ID NO: 41486 - DNA, 201 bp, Homo sapiens
gaagctcagaatcggtactcgcctccacactgtgccatctggctctgggttctgagagtcagggagaggaatgagggtcagtctgtttgccttcgacctakgcagcctcctctcagggcccgagactgggcagcagcatggccccccgaaggtcgaggactcgggccgtgaagtcagcctgcctaggtttgaatcccaccc

SEQ ID NO: 41487 - DNA, 201 bp, Homo sapiens
tctaaccttgatgtagcttcctctcttccttcccctacgttgagctggcttgcagcaaggcctctctgtgctttttctgtgcctgggcaaagtgctgggartgtaaggatgagtgaccggtcacgtgcctgggagaagctcagaatcggtactcgcctccacactgtgccatctggctctgggttctgagagtcagggaga

SEQ ID NO: 41488 - DNA, 201 bp, Homo sapiens
aattttgagcctcgaaggggttgttttgcacaagaggccctggattcactggggaagtgtaagtccctgaccgcaggcctggcttgctctaaccttgatgyagcttcctctcttccttcccctacgttgagctggcttgcagcaaggcctctctgtgctttttctgtgcctgggcaaagtgctgggagtgtaaggatgagt

SEQ ID NO: 41489 - DNA, 201 bp, Homo sapiens
ccttcctctcctgggggccctctggggcagtggctggagatctggcaggccaatgcttgggagccattgtgcccccctccctgcctcccccatctgtgctrtatagtcctgggctgagatcaccagccaaactgagggcctgagccgcttgctgcggcagcacgcagaggatctgaactcagggcccctgagcaagctgag

SEQ ID NO: 41490 - DNA, 201 bp, Homo sapiens
ggggcctgtggcctggaggaggaggcaccagcttggtttggggtcttcctgcctgggcttcccttcccagctctgcccagcgtgagcctgggccagtccartgcccactccaggggcctgtggatggctctgcatgccactccatggttgtaagggctgagggcatataggggggagagagagacccccggctgcccccac

SEQ ID NO: 41491 - DNA, 201 bp, Homo sapiens
taggtggttgtaatctgaagaataaatctgctcagtctttggaatattgtgctgaattactgggtttggaccaagatgatcttcgagtaagtttgaccacragagtcatgctaacaacagcagggggcaccaaaggaacagttataaagtaagttccttaagtaattgcactgcaaaaattttgccttgcagtttgtcaag

SEQ ID NO: 41492 - DNA, 201 bp, Homo sapiens
agttgagagaagctcttttattctgattattttagttatttgagtttcttgataatgtcaaggtgacattttttaaaaaacatctcactaatatgtttaccataattttcaagattatctgtaggaattacattgtcccattataaattagtctatttcttatttgaatctttcatttttaatttacacttttaaaaattg

SEQ ID NO: 41493 - DNA, 201 bp, Homo sapiens
tcctgaaaaattagaaatatttattgaaagcttaagacaaagatttaaatatcttttctctcgttatgttacctttaatttaattttgactataagaagcygttatattggttgatgggtttttgacattcttaatattatagtgggttatttggtaaaggattgaaatcattatggaattttgtggtatatagtggaaat

SEQ ID NO: 41494 - DNA, 201 bp, Homo sapiens
cttccctgagccacattggaagaagaacagttgtcctgggccacacataaaatacaccaacactaatgatagctgatgagctaaataaacaaaacaattgsaataaaaatctcataatgttttaagaaagtttatgagtttgtgttgggcctcattcaaagctgtcctgggccacatgtggcccatggactacagcgtgga

SEQ ID NO: 41495 - DNA, 201 bp, Homo sapiens
atcaattgagattttagtttttttctggttttttttctattaccaacagtgacccagaggacatctggacattgtccacatgcatatctttgcccacaagkgtgaaaaatcatagaatagatttaccgagccaaagggatatttccaaattgccatccaaaattgttacactggcttacttttctactaagaatgcatctg

SEQ ID NO: 41496 - DNA, 201 bp, Homo sapiens
ttttttaagtatcaataatagatatcataatagtaataatgataatgatatagaatttgttccagtcatgtagctaggtgatgagaaaatgcaaaaatccrtaagttgtagaaataaaaatatttacgaagctttctaaaataaagatatttaagatttgaattgtactttaactttccattttcattttaaagagaatta

SEQ ID NO: 41497 - DNA, 201 bp, Homo sapiens
tatttgttgaatggaatgaacagtgtagaaaatatgaagatttatttgtgactaatgctaacaaatactggaaaattaagtaattcatgtctgttgtattmttccataaagtagagatgtatttttgtaatattcaagtccatttttttccccattggaattcctctttatttcctaagtgaacacctagtgtcctggcaa

SEQ ID NO: 41498 - DNA, 201 bp, Homo sapiens
agctattttaaattttaaggaagagatatgctgcagttaccctgattggtgtggatggatggtgtataacggaaggtggctcagggaatctgggaagcccwgcagaggccccggggctcaggcacgtcagaagtgttaatggttcagctgaagtttagggacccgataaaaacccttaataggggcttcctcagaagtgaa

SEQ ID NO: 41499 - DNA, 201 bp, Homo sapiens
tcaatttttcttttggattaataaaagataccataaattgaatatatattttggagaaactgtatacctcttggatatatcaacattgttaggagcaagtrttttacacagggtgaggaagaatacttttgtagtcaactaatggggcaggcttaccatacatcattatctgtgttaaatgcctgtgtcctctaagagatg

SEQ ID NO: 41500 - DNA, 201 bp, Homo sapiens
aaattaaaagcaagcttaagttgctcattaaacatttaacccataaatgttctaggcaatggttaacatatattgtttggaagaaatctgggaccaaatgrtcaccacagagctaaatcaatccttggcattcagtgatagggatgggcccagaaggtgctacgagctgtattaaactccttagtagcagggtgaatacag

SEQ ID NO: 41501 - DNA, 201 bp, Homo sapiens
agttcgatatagtaaagacagaatttatgtaagtattttacctgtagtgtaagtttttgtggagataattatttcatgtggtactctttgattttgtcacrcttgaaattgtctaacagaaaatcatgcttgatctgagcctcttgaatagagtgtgaggttagtgaggacaaagatttttttctaatttacaactcgaac

SEQ ID NO: 41502 - DNA, 201 bp, Homo sapiens
ttttatggggagagagatttgatgagggctctactttagttaatgtgctgagaagtctggattagagaggagagagactgaggcaataggtaaataagagrctaccatgatcacaaaagaggtaatgagaactaaactggtattggagcagtagaaatggaaagaaaggagataggttgagagattcagattatgctttga

SEQ ID NO: 41503 - DNA, 201 bp, Homo sapiens
cttaattttaatttttaaaaatttaaatttaagtagtcttatgtggctagtcccgctgtagagcatgtggctagtgactgccaagttgaacagcacagatrtgtattcccttaggtaggctccccagttctgctattgtaaccttctaaatagtgagtcctgatagtctctaatccaagctgtcaccatctcttacctgga

SEQ ID NO: 41504 - DNA, 201 bp, Homo sapiens
cagtgttcattacgagaaaagaggaatacaggagtgttctactcctttagtcagggtcccagctcttggcaggcattcaggaaattgcacctggaagcaartacacccatcttcttttcttatgattttactgatttggaagggtttgaggttactagagtttgatgagtagaatgaatgagaaaataattacgaaggaaa

SEQ ID NO: 41505 - DNA, 201 bp, Homo sapiens
gtggcacaatcatggctcactgcagcctcaacctcccaggctcaagtgatccttctgcttcagcctctcaagtagctggaactagaggcatgtgccaccaygcccagctaattaaaaaaaattttttttgtacagacaggatctcactgtgttgctcatgctggtctcctggtctcaaactcctgggctcaagtgatcctc

SEQ ID NO: 41506 - DNA, 201 bp, Homo sapiens
cttttcttggttcctgacatggcgtatgcccctgcttttcttttgaattctctgaccattcctgattcccctgcaggctcattttcttctacctggacatwtgttatcatttttcaggatttaagttaggcctctttttcttctcattctatgtcagtactgtccagaagacctttacatgatgatggagattttccatat

SEQ ID NO: 41507 - DNA, 201 bp, Homo sapiens
tgcgcctctgctgtcaaatgggcttacctccttaactaaatatcctaaagcttctcttgtctgctatcaagcacttctgcctaccacttaaccttccctcytgttgagaaagtaggggttgcctctctgcctggttgaggcttatagttctttgaaagccatctcttcctagtttttcatggatcttcagcattgtttatg

SEQ ID NO: 41508 - DNA, 201 bp, Homo sapiens
acctgtcctgccaagttttcctggtcagcatgttctgtttctcatcagagactggtcagacccatcctgctttcctcaaatctctgcgcctctgctgtcaratgggcttacctccttaactaaatatcctaaagcttctcttgtctgctatcaagcacttctgcctaccacttaaccttccctcctgttgagaaagtaggg

SEQ ID NO: 41509 - DNA, 201 bp, Homo sapiens
ctctgcatctgtgacacttcatccatttgcttaaactatcacttcctacccctcaccctgccatgtctgaccttgctcaggcaccaggcttgctctgtttrctttatgccttgcccatcctcccttctcaccaacactacccctaatttttcccaaggtatcagccttctcctttcttgtttaccttttgatccaactcag

SEQ ID NO: 41510 - DNA, 201 bp, Homo sapiens
attctttctacctcattcagcataatctgataattgattccaaatgaatgcctttaagctttaaaaaatattgtttgacaaacaaatgttaaaatgtacamcagtgcagcttagggacctactgtatgtttttgaaatagaatgattgaaaatattgttttgttttcttttacactttggcctaagtcttaaggggcataa

SEQ ID NO: 41511 - DNA, 201 bp, Homo sapiens
ggcagagtctcactgttgctcaggctggagtgtggtggcatgatctcagctcattgcagtctctgtcttccgggcttaagcgatcctcccaccccagcctytgagtaactgagactacaggtgcgcaccaccacacccggctaatttttgtatttttgtagtcaggcttttgccatgttgctcaggctggtctcttaactt

SEQ ID NO: 41512 - DNA, 201 bp, Homo sapiens
gaccattgttcataaaatctttaacttaaaaaaaaactcatgctgaaagatgtgttataatttttattttagagcccaagtaagagttctaacttttaggyttatactttaaaaaattaaatattcatctaagtctctgtcacagtgtaatactttatacctcttgttgttatctagtgaagtgacaggttctggttcttc

SEQ ID NO: 41513 - DNA, 201 bp, Homo sapiens
attcctgccaggcagcgggagattgaaatgaaccgacagcaacgcttcttccgcatcccattcatccgccctgccgaccagtacaaagaccctcagagtargaaaaaaggctggtggtatgcccattttgatggaccatggattgcccggcaaatggaactccatcctgacaagccacccatcctacttgtggctggtgtg

SEQ ID NO: 41514 - DNA, 201 bp, Homo sapiens
tgcagtcatacctgaaggaaggcagtagtagagcaggtgtacctgagggtggaacaacctctgcttggcctcatctaaaagtagataaagggggccgggcrcggtggctcacgcctgtaatcccagcactttgggaggccgaggcaggcggatcacgaggtcaggagatcgagaccatcctggctaacacggtgaaatccc

SEQ ID NO: 41515 - DNA, 201 bp, Homo sapiens
taggctgctcagggcttcagctttattcagttgttcaattttattttgttattgtttaacaattctgatgtctagttaaagtttagtaatgcattggtttsagggaatatggtctgagtcacaaatccatagagctactattatgcagggatggaaagtggctttttaatggagttgaccaatctgttcctaatatgagta

SEQ ID NO: 41516 - DNA, 201 bp, Homo sapiens
ttaaacaaaatttgataaaagttacactcttctgggtaacaaaagcaaaataagttttttgcctttggcaaatgtttatccctggaaaatcagaatgcctsagatctttcattagtccattttgatattctttttcttaaaagcatgctttgatttggaatttttagagctttgaatacatcagattctttttaaaactct

SEQ ID NO: 41517 - DNA, 201 bp, Homo sapiens
tcacaatatatgaattttctaatctagatgtaatgtatttgctctttaattttcactgcatgccttattttccaatcatttttaatgaatacttaaaaatrtattaaaattctgagtgatctcatgttgattacaaataattgagtttttaaaatcaatgagtaaagtaattgaaacacaaatttgcacaatccagatttt

SEQ ID NO: 41518 - DNA, 201 bp, Homo sapiens
actaatcatcccagtagtctagttgctttgagaagtgagtgaaaggcagtctttatagtgaaacagtgagctcttctttcttttccatttgccttatgcaytgatgataacttgggaatgtatctactttttggagtttctttcaggaattttgttctaaaattcacctcaggcctttgaaagtggtttaatgcagggctt

SEQ ID NO: 41519 - DNA, 201 bp, Homo sapiens
ttgtcataatactatttattgaataatcttactttctccgttgatttgaatagtcccagagactgaaatctaggtcttgtaaataaaagtcctggcatcayttatagctcagcctttccctgcctatctcacactttttctgacctgaaaagctcacattgactcaagactcagattaaccacttactagagttatactga

SEQ ID NO: 41520 - DNA, 201 bp, Homo sapiens
attccattagttttcttgtagcagttttctacttagccccatttatctgtgcctattctcacatgacctttggtaactctttattttgttcttctctgtgkgtatgtttaggtgcactctgtggcattttcacagtgcactattataaagaatttttactagcatagttttcttttatagggtacctctgaaagtggagca

SEQ ID NO: 41521 - DNA, 201 bp, Homo sapiens
aatgatgatacggttttgtcaatacttagctgacaataaagtgatgtgactgttctggccttaatctagcatttcttcctgcttggagggttgggagtatrgtatttttgggtttcagaatgtacagcctttcctggtacaatggcaggcatcctgaaagggcagctattgaaatatatctggtcagaggatttcctgttt

SEQ ID NO: 41522 - DNA, 201 bp, Homo sapiens
gtggaggtagttatggcaagaggctcttgtttgacaccattggttaggtgttgaatagtatgttagacatacatgcagtgtaggcacatgagcagtttcartgagggatcaaacaaatgaatcaggcagcatcttgcccccaaggatctgatttagtagacaaaaccagatatgtaaaattatcataataacactggcagt

SEQ ID NO: 41523 - DNA, 201 bp, Homo sapiens
gcaaccaggtatttcagaggaaagtgagagagatggggagtggttcaacagagtgctttgggtaaagaaagaggaacgtgtagaccaggctccaggggacmaggatggaagattagggatatagaaaggtaggtgacctcatacccaaaccagatatattaatacctctgctgcctaaccctctctatatccttccttaat

SEQ ID NO: 41524 - DNA, 201 bp, Homo sapiens
gacctcaggtgatccacctgcctggggctcccaaagtacagggactacaggtgtgagccaccgcacctggccaatctccatatccttttgcttagaaactrcttatttttcttttaagactctgattgaggtcaccttgtttatgaagtttttctacagatacccaatctctccctcccccccattcagtagaattgactg

SEQ ID NO: 41525 - DNA, 201 bp, Homo sapiens
tcaggccgatgttggaatcatgactttgccattattagctccgtaacctcgggcaagttatttatttccttggattgtcatgttctatccttaattagatyaaacataataactcctgtgaaaagctttgagcagtacctgacttatagatgacattcagtaaactatacttactaattatagctatgattaatacaatgt

SEQ ID NO: 41526 - DNA, 201 bp, Homo sapiens
ctcataatacatttttaggtaactgaataaaaagccttgaattttgttataagttatattcattattatgagtttctgattcagtgaacaatctttttttwatttgagtattcttctatttctgaatcgacatttgatagcagattggtttaaaaatagtatatttgcctatatgaaatggatgtcattcactattttcct

SEQ ID NO: 41527 - DNA, 201 bp, Homo sapiens
tcacagtgaagttcaagagcagaccctgcattgttgatatttgtatgtaaaatatcataatgtaggcctagtaattgaacatacagaaatgcttgtaattwtctgaatgtgttcattcttggttcttaacatatctgattgcctctcctaatgttcttgcttctgcatactgtctggttgaccttcaaaccttctctttcc

SEQ ID NO: 41528 - DNA, 201 bp, Homo sapiens
taagtaaaattacaagttcaattcctcagtacactagccacacttcaggtgcccagtgtccacactgactagtggtgactgcgttggacagtgcagatacrgaacatttctgtcatcacagaaagttcctttggacagagccatgttaagtgatgttatcacaagatggacagaaacattcctgtttgatttatttttcag

SEQ ID NO: 41529 - DNA, 201 bp, Homo sapiens
atttcacgtggttatttaaattaagtaaaattacaagttcaattcctcagtacactagccacacttcaggtgcccagtgtccacactgactagtggtgackgcgttggacagtgcagatacagaacatttctgtcatcacagaaagttcctttggacagagccatgttaagtgatgttatcacaagatggacagaaacatt

SEQ ID NO: 41530 - DNA, 201 bp, Homo sapiens
ttatgtaatatatttttgatcatttaataactcatatatgtattgtttttcagattcccagaaaatctaagctggcagttcataggaatatcagagacgaygaaggcttcattatcaggcattttgcgggggcagtgtgctatgaaacagtgagtataacttttacaaggagaaaaccatttcatgttgaagctgcactgt

SEQ ID NO: 41531 - DNA, 201 bp, Homo sapiens
gaactttaaaattttcctctaatgaaaaagataattatttatgcagtagctatcctttaaatattacataattaattctctaatcttgagaggggggactygtttttagattatgattaaattgtcacttagaaactattagtacaaatcttttctatggtctgtggaatatcccttgagccgcaatagacataaatgaca

SEQ ID NO: 41532 - DNA, 201 bp, Homo sapiens
agaggttaagtgacatgcctaatatggcatgtaaagaaatggtaggttgggagtcaggctaggcactttggctgcagagccggcactctgacttgtcctgrtgtattgcctcccacagggaacagcctctctgttctgctacctctttaaccttgagcaagcctctaaggttcccaagtcagttttctcaattttattttt

SEQ ID NO: 41533 - DNA, 201 bp, Homo sapiens
ccagcctctgagtaactgagactacaggtgcgcaccaccacacccggctaatttttgtatttttgtagtcaggcttttgccatgttgctcaggctggtctyttaacttctgagctcaagccatctgcttgccttggcctcccaaagtgctgggacttcaggtgtgagccattgcccctggccacaaattctattcttaagc

SEQ ID NO: 41534 - DNA, 201 bp, Homo sapiens
atgtaagatattctagcacctgtgttgaggtacggtgcaaggtcaattgtgattcttaggaggctcaaaacttaacaggatttgggtagagacttaaatgrggatgtttaaaatgaaggatgaccattataaatactctgtgcttacgtttagttatttgttttttcccctttatttggtgaatattataacctctttgat

SEQ ID NO: 41535 - DNA, 201 bp, Homo sapiens
gtaattgtgttaaccttcactagggactaaaatctcacatccacctgctccattgacttgcaattcttctgtatccctatatatttcttgtaatgtggaayctatttctgttacttcagtggagatagaaataaaacaatatgtatcctcaacaaaacttctgctaaaattgaagatatatatccaatcctattccttaat

SEQ ID NO: 41536 - DNA, 201 bp, Homo sapiens
ttgcactatgattgtaagcttcatgaggccctttccagaagcagatgctgcagccctgcttatacagcctgcaggactgtgaagcaattgaaactcttttyttaaaagttatcctgtgtcaggtattccttcatagcaaggtaaaaacagaccaacacagagagattgttataaagatacaaagagaaattccgtaatgag

SEQ ID NO: 41537 - DNA, 201 bp, Homo sapiens
ccaacagcaagcagttctggagcaggagcgcagggaccgggagctggccctgaggattgcccagagtgaagccgagctcatcagtgatgaggcccaggcckacctggcgctgcggaggtactggggcccctgggtggggtatagcgctctctcctttgctttctctacctctctgcctctcatttccatgcagaagggaat

SEQ ID NO: 41538 - DNA, 201 bp, Homo sapiens
gtaagaccagcagttaaggttgtggcttagaactcttgactggtgcaggcaatacaaattagataatgatcagccaattcattttgaccctctttcctaargagttttgagtggaaaatacactcagagagggaaattgaatctgaagcaatagagagattaggtagagtaaagagaaaagcagacagacagcagtagaaa

SEQ ID NO: 41539 - DNA, 201 bp, Homo sapiens
aaatggagatagcctggtggctgcatatactgatgctagtatgttagaaaatgggctgttagaacacacacacacacacacacacacacacacacacacasacacattttttttttcctttttgccagatgtgcaactgtatacagagggctattatttattaaaggtgtgtttctggaactggcccagaatgtcatggac

SEQ ID NO: 41540 - DNA, 201 bp, Homo sapiens
agatagcctggtggctgcatatactgatgctagtatgttagaaaatgggctgttagaacacacacacacacacacacacacacacacacacacagacacaytttttttttcctttttgccagatgtgcaactgtatacagagggctattatttattaaaggtgtgtttctggaactggcccagaatgtcatggactttagt

SEQ ID NO: 41541 - DNA, 201 bp, Homo sapiens
tccagcctggacgattgagtgagactccgtctcaaaaaaaaaaaaaaaaaaaaaaaaaaaaagtaagccgctgactaacctttacaaggtaatatattttstgtggcagaattttttgatttctgatctatgtggatgaacatctttttcaacagatatttactgagggcccactgtgttttagatatgacaagtgtgaac

SEQ ID NO: 41542 - DNA, 201 bp, Homo sapiens
ccagtttttctgtgaatttaactactttagctatttctcatgtaagtgaaattacacagtatttgtctttctgtgactggcctattttatttaactcaacwtaagattcatccatgttgtagtatgtgtcagaatttccttccttttatttttattttttagtattttggatcccatccttcctttttaaggctgaatact

SEQ ID NO: 41543 - DNA, 201 bp, Homo sapiens
gttttaggctagctgcagtggctcatgcctgtaatcctagaactttgggagtccaaggagggaggattgcttgagctcaggaatttgagactagcctgggygacatagtgagacctcatctctacaaaaaatttaaaaaattagctgggtgtggtggtacatgcctgttttagctactctggtggctgaagtgcacttaag

SEQ ID NO: 41544 - DNA, 201 bp, Homo sapiens
ataatgacattttaatttcttgtgccacattactaaagttattagtgtgtctgtgatcgacatgtcacaaagtaaaaatatgaaaagtgaatgtggagatrtcagattttgcttttttgccttagcttctattataaagtctttttttaaagttttttgttcacttaaaattattgctatcatttttgtaatagatgcttt

SEQ ID NO: 41545 - DNA, 201 bp, Homo sapiens
tatcagttgctttgttttgtgaccttaatcacattccaggagttggcactcggagtcgcaagcagccatctgtctgcttatttgtaagaccagcagttaargttgtggcttagaactcttgactggtgcaggcaatacaaattagataatgatcagccaattcattttgaccctctttcctaaggagttttgagtggaaaa

SEQ ID NO: 41546 - DNA, 201 bp, Homo sapiens
taagtctctgtcacagtgtaatactttatacctcttgttgttatctagtgaagtgacaggttctggttcttctggttgggcatcactgcattgctctcctytcattctgttttcaagcatgaaggtattaaattgcctaagaatcattctcttctagcatttttgaaacttgctcttatattacccacttgagcttaagta

SEQ ID NO: 41547 - DNA, 201 bp, Homo sapiens
tctgtagttttactttactttgaatatagctgtcatttcgaaaaggaggaatttccaattccttagcctcttctcctggtttacaaatggaatggttattrtagtcatttgctttctttatgtagtagcttttctaaaacctatattaaatatatactgttacttttttataaacggccagatttgaaataaaaatccgtc

SEQ ID NO: 41548 - DNA, 201 bp, Homo sapiens
cactccacatttccttaacacacggaccctttctaacctctgagtctttgactgtgtggtttgatatggctggaactcttccccttccatttgtctttcarcccactttcacctcatgctacatctatcaaaatactcccatttgtagcttagttcagcatgcccctcctgccctaccactaattacccaagaagcatcat

SEQ ID NO: 41549 - DNA, 201 bp, Homo sapiens
tgtgtgacagggatcctatctcaaaaataaataaataaatagttaacatgtggcttacattttatatcttttagtatacaacatttatctcatttgagaarcaccttatttgtcaactgaagcagggtatttttaatacttttaatgcctataaagttttgtcttgaaatgagaacatttgggaagtatagaacaaatata

SEQ ID NO: 41550 - DNA, 201 bp, Homo sapiens
attggagtcctagatattgctggttttggtaagtagagtttcttttgtgagtatatatttgtttcatattttttcacacattagaatttgttcttaaatcytttctcctttgtaactcattttacttgatgtatgtgtaattatatgtccacactcacatttcataatatgacctagatagggagctgatactttaaagag

SEQ ID NO: 41551 - DNA, 201 bp, Homo sapiens
tttaccccaataatagacttttgatctaattttaggtaattccattagttttcttgtagcagttttctacttagccccatttatctgtgcctattctcacrtgacctttggtaactctttattttgttcttctctgtgggtatgtttaggtgcactctgtggcattttcacagtgcactattataaagaatttttactagc

SEQ ID NO: 41552 - DNA, 201 bp, Homo sapiens
atagtactttttaaagcagcccttataaatagaaatctgtagatatgatgtactaaggcaaaaatgacctgcctggccaccttctgctgcaatatatcttytcctcacatacccctgtgcaagcacacaaaaaataaaatggcacacgtgcaggctggatgtgccaatggcagatttctcaaaatgcccacatgggtcaag

SEQ ID NO: 41553 - DNA, 201 bp, Homo sapiens
ataatgcaaataaatataaagaatagttaatcgttagtactttctctgtaccagacactattccaagcatttcacatacataacctcattaatctaaatarcaaccatgtaaggtaggtaaagtaattatcccagttttatggacgaagaaactgtgcacaaagagaataagtaacttattcaaggtcacatagctagtag

SEQ ID NO: 41554 - DNA, 201 bp, Homo sapiens
ttctgtagggaagaaatttctgaactcttacccagtgctctagaatcaagtttcatctatttgtttcacctcttaaaaaaaaaattaccagaagtgatggyatgtgcatctagtcccacctactcaggaggctgaggtgggaggattgcttgaactcaggagtttgaggctgcagtgaactatgatcatgccactgcactg

SEQ ID NO: 41555 - DNA, 201 bp, Homo sapiens
cctcccaaagtgctgaaactataggtctgagccactgtgcctggccttgtatgtgttttttgtttatttgtttgtttttttaacatgaaagatcttgtackccataaaatgttttacaattctatttttttatgtaacaatagctcatgttggaagataaagattcaccttactttaaaaaattattgcatgactctctgt

SEQ ID NO: 41556 - DNA, 201 bp, Homo sapiens
tattctcctaattacttctgttgccatttgagtttgtttgctaatgaaattcttttttttctttttttaaatacttaaaaaaaaaatggaggccagctgcrgtggctcacgcctgtaatcccagtattttgagaggctgagacaggaggatcctttgagcccaggagttcagaccagtctgggcaacataaatcctatctc

SEQ ID NO: 41557 - DNA, 201 bp, Homo sapiens
tcttgaaaatctggtttatataatacttattaatttcaatgaaaatatatttctattaggtggttgtaatctgaagaataaatctgctcagtctttggaayattgtgctgaattactgggtttggaccaagatgatcttcgagtaagtttgaccacaagagtcatgctaacaacagcagggggcaccaaaggaacagttat

SEQ ID NO: 41558 - DNA, 201 bp, Homo sapiens
tatgtttcccagcttgtcttttttagagagtatggtgaaaatgagaaacaggtttggaatcaactgaataacacctgtggttggaaaccaaccatttagayattttctctgtaagtaggcttttttttttttaaaggagtgattttcaaacttttgtgggatcttctaaaaacatattgtttatttggatttgagactgat

SEQ ID NO: 41559 - DNA, 201 bp, Homo sapiens
ggagattttacccctggtggttcacatgaagaggctatttgcagaggttagagaacaaacaagtgtggtaaagcgctcagggattagaaacagtaagaaaytcttagttctccagaaattaccagagcagaaagctggcattgtagaggagggctagagggagctgcggttttgaagcaggaggggcgtgaagggaggttc

SEQ ID NO: 41560 - DNA, 201 bp, Homo sapiens
ggaagtgaaatatgttaccagaatctcttcattgacttttttttaaagcttatttggggcttatagcattgtatggagaagacaatgcagtgttaaatttygcacctaaattagattgtaatgactgtttcagctttttgtttgtttgtttgtttgagatggagtctcgctctgtcacccaggctggagtgcagtgttgcc

SEQ ID NO: 41561 - DNA, 201 bp, Homo sapiens
cttgtaatgtggaatctatttctgttacttcagtggagatagaaataaaacaatatgtatcctcaacaaaacttctgctaaaattgaagatatatatccawtcctattccttaatagctcgctggtctttgttatgaccagcctatggatgcatgattacctttaccaggagttggcacctagagtcataagcaggtgact

SEQ ID NO: 41562 - DNA, 201 bp, Homo sapiens
aagtatgaatgacatttaaggaaagatcatgattaaaaactgtataatatataaaactatatatgatatacatatatattcttggttagtgcctagaaacrtgagcaagaaaaatgttatgaacaattacaatatttaatgtaaattaatgcaattaaatattgcattaaaaacaaaagatcgtaaatcataaccagtagg

SEQ ID NO: 41563 - DNA, 201 bp, Homo sapiens
agtttttaattaggtagtcttagaatatatcgtttattaatattaatctgaaaatatttgtaaaatgctattttttattataatgcaaataaatataaagmatagttaatcgttagtactttctctgtaccagacactattccaagcatttcacatacataacctcattaatctaaatagcaaccatgtaaggtaggtaaa

SEQ ID NO: 41564 - DNA, 201 bp, Homo sapiens
agaattcaccttaggcaaaaactgtaaacaatccaaatattcatcaacagagcaataggtgaacaactgtggtatagtcattcattggactagtacgcacwacaaggttaaatatgttgaaagcaaaaacagtttgttgaatgaaagaagacagacatgaaagaatacatactgtatgatgtcacttatatgaagttcagg

SEQ ID NO: 41565 - DNA, 201 bp, Homo sapiens
tctgtatgaccttaggcagggaacttagccttttcgtgtcttagtttcctcactgtaaactgaagataatagtacctacctcatgttgtaaagaggaataygcgagttaaatatttgtaaatgatttgagtacttgtgtctggcacatagtaatcattataagtgctttaaatgagtaagtacaattaaaatacagattgc

SEQ ID NO: 41566 - DNA, 201 bp, Homo sapiens
attaaatagaatttctgttatttatttgtcatatgaaaattgtctctttatatgcagtttgcttaaaaactttaagaagtatctaaaatatactgagttamatgttgaatctcccaaatgaagaatgtttcattatcagtcattctgagctctgttttgaacaaatcagtgatattgcttaggaataaacctctcattttt

SEQ ID NO: 41567 - DNA, 201 bp, Homo sapiens
agacatttttggctctcataaaccaagtgtttcctgcagaagaggacagtaaaaaagatgtggaagataactgtaagtaccaagttaaaaattaactctcygcacagaaaaggagactgttcttttaaaaaaataaattagtggttatataactgatacactgtgcgggttcagaaacaatctagtcttttgacatgaata

SEQ ID NO: 41568 - DNA, 201 bp, Homo sapiens
ttactctccaaagagtagcatgtactctccaaagaagaaaattgccctcttattctagagtcagtatactctttcagaaatcttattcacattgagtgtgygtttatatgtacagttaaataatggattaatatgtttaaattactttttatgtcttctttatcaggaggatgaggtgatcattttgactaattaaaccct

SEQ ID NO: 41569 - DNA, 201 bp, Homo sapiens
aaaaaaaaaaaaagcttatatattattgtagttctgtttaaaacatcatatttatgtaatatattatgaaaaatttatatattggtttcagtaaattatawttctaagaataattagatataattataccattaagtattatttttaacacattaagttcttaatgtaaaaatttacaacccttataaattttaatatgca

SEQ ID NO: 41570 - DNA, 201 bp, Homo sapiens
actatgtttagatttttgatactgaaaagatataaaattgttgccctttaaaagtagaaaacttttatgtcattgatttttaatcattttatttaatctaygctcagagattaggatttttaatattcctggttttattagtaggaagaaaatgcttataaaatatagaagtattgatttgaatggtgagattatacagta

SEQ ID NO: 41571 - DNA, 201 bp, Homo sapiens
aggatagaatttcttaacttctcagaatttaaaatattacttgaaaaattaaaccatactatcggttcttacttgagattctacatatttagtaggaaggygattttcatgattttatacactatgtttagatttttgatactgaaaagatataaaattgttgccctttaaaagtagaaaacttttatgtcattgattttt

SEQ ID NO: 41572 - DNA, 201 bp, Homo sapiens
caatatgtatatgtattacaaaaaatctagtgaaattaatgttttatcaaattacttgcattaagaaaatgactagcattttaaactgagagtatgtacarttcttattgtagcaaaactcttaacatagcagctgaccttttagaataaagactaacttttaggtgctggtttttggttactgtattttcaaacactgat

SEQ ID NO: 41573 - DNA, 201 bp, Homo sapiens
agtttatgcttactgttataaggttttttttgtcatatggttgtctaaatgttgttaatatctatgtcattgtggtcattttaaatcctaaaatttgttgrcaaaagaaaaaatttttatatggcttctactttttgtggaaatagtgattaaactgacaaatgtctacatccttcagatttttgaaattactgtttattt

SEQ ID NO: 41574 - DNA, 201 bp, Homo sapiens
gacagaataattatatcattatgttagacgaataaattaacatgtcaattttttttttttgctcaatgtaatcaatagatattgagctcctggcagcttgyagagaagaatttcataggagactaaaagtgtatcatgcttggaaatctaagaacaagaagagaaatactgaaacagagcaacgtgctccaaagtctgtta

SEQ ID NO: 41575 - DNA, 201 bp, Homo sapiens
tttttgggggaatggaactattccatatatatatatatatgggggaatggaactattctctctctctctctctctctctctctctctctctctctcttttmtatatatatatatatatatatatatgtatttttttttttttttgagacagtcttgctctgttgcccaggctggagtgcagtggcacaatcatggctcact

SEQ ID NO: 41576 - DNA, 201 bp, Homo sapiens
tgggggaatggaactattccatatatatatatatatgggggaatggaactattctctctctctctctctctctctctctctctctctctctcttttatatmtatatatatatatatatatatgtatttttttttttttttgagacagtcttgctctgttgcccaggctggagtgcagtggcacaatcatggctcactgcag

SEQ ID NO: 41577 - DNA, 201 bp, Homo sapiens
ctctctggcttatttagagtggtagagcttctttgacgtttcctatttctacctctgcttgtatcgagctgtagaactcttcatttagaatataacatttkcaaatattgaaaaattacttttttttttgtgggattgccactaggtggtgggtataatatgtgaggaatgatcagcagtaataatagttctgatagtttc

SEQ ID NO: 41578 - DNA, 201 bp, Homo sapiens
ggcgtgatcctgggaggcggagcttgcagtgagccaggattgtgccaccgcactccagcctgggtgagagagtgagattccgtctcaaaaaaaaaaaaaaraaagtagataaagggggcagagttcagcaagaggcaagggaggaggtggggattttatgtggcatgggcagatgtgtttgttagttgggacttacatgtg

SEQ ID NO: 41579 - DNA, 201 bp, Homo sapiens
tgtgctttttaattgacattacttgttatatgacttgaaactggtatttgagagaaggttacttctgtattactgcctggaagttattttttccaccaagrcttcaaaggtatctttgttggaagttttctataatctcttctatttattttgaaggatgttttcctatttaaatagttagcatgtgaattggttaagggg

SEQ ID NO: 41580 - DNA, 201 bp, Homo sapiens
agcctgggcaacagagcaagactctgtctcaaaaaaaaaaaaaaattaatagaagggggaagtgagtgtccatggcttcttccaggcagaagtacatcatyatcacatagaataagacatgttcagattgttgggaacaagtgccccaaaatctggccataaactggcaccaaaactggccataaacaaaatctctgcagc

SEQ ID NO: 41581 - DNA, 201 bp, Homo sapiens
gttctctgtgtacatcctttctgatcagatttgcccaattccatctaaatgtctttaggctgtgtgtaattttcagaaaaatgcagtacttttagtctacygtatagcaaatatgttcattcactttttattagaaacagtttttaaatgaagcaagccttcaattgtgagactaataaatgggagcagtagattcttgtt

SEQ ID NO: 41582 - DNA, 201 bp, Homo sapiens
gtaaatattcattgaaaaaaaaatcaaaattacttcttaattaaattgtggtagttaatttttagatattgttaatgttcagatattttcttctttgtccygagtttggacttagtgatgggtcttttctttccattgttaataaaagtttattgctgataaaaccaagatattcacaataagttcagtacttatgttcaa

SEQ ID NO: 41583 - DNA, 201 bp, Homo sapiens
gtcatcaacattttttatcctatattttaaacagatacctgactgaatcctatggaacaggtcaagatattgatgacagaattgttgaaggtattgctaayttttcagttgttacgcgtgtactgaaattaatttacaagacttcttttagtggtctggaatgttcttctctcagagatgcaaaagactctcttatctcct

SEQ ID NO: 41584 - DNA, 201 bp, Homo sapiens
gagtctaatgaagatagttaaaaaatatatatgtaaacagaggcaaatctaggaaatttaaagctgttaattttgcctagttgtaaaatgttgacaaattstaaatttaatagttgtattagaggaaaaaaccccacagatataatctaggaaatttaaagctgttaattttgcctaattgtaaaatgttgacaaattcta

SEQ ID NO: 41585 - DNA, 201 bp, Homo sapiens
taaaatgaaaaaaaaaaattcaagcaaaattagatatgttcttaatgtgcattaaaattttttgtttttttttgaaggattggaaaatttgttttgaaaaygtaatgaatgttagcatacatttcatttgctctctagcattgttataccaaaggagcatatgtgggagattctaacacaaaaaaaagtctttacaataat

SEQ ID NO: 41586 - DNA, 201 bp, Homo sapiens
ttaccctgtggtagaagatgcagttgtatagagtattataagtgttgcatgatcaagttatttgaagagtatgaaatgcccaaaaggtaatgctatttgcrttatctcttatttttcttctctaacttccttctattgagggtaaagtgaacagaaatcagggaagattggaaagagacagggaatcaataagattaatat

SEQ ID NO: 41587 - DNA, 201 bp, Homo sapiens
aagccgagtgtatcttagacatcatgcaatataatctcttgattttagaaatgaattggtatccacagcatttttgataagtaattttacagattatgcakaaaaaaatcttctaaagcacttgtattttaagtaatttttgtgcttaatttagattgctttaatacctgtgctttaaaaaattgttggccgggtgcggtg

SEQ ID NO: 41588 - DNA, 201 bp, Homo sapiens
gcggagcttgcagtgagccaggattgtgccaccgcactccagcctgggtgagagagtgagattccgtctcaaaaaaaaaaaaaaaaaagtagataaagggrgcagagttcagcaagaggcaagggaggaggtggggattttatgtggcatgggcagatgtgtttgttagttgggacttacatgtgaacttttgaaaaagat

SEQ ID NO: 41589 - DNA, 201 bp, Homo sapiens
gtttcttcatgttggtcaggctgatctcgaactcccgacctcaagtgatccacccgccttggcctcccagagtgctgggattacaggcgtgagccactgcrtccagtgtgtgtatttatttttaagcaggcatattatgttcaaagaatgcatgtgtctttttggtagaacgatttattttcctttgggtatatacccagt

SEQ ID NO: 41590 - DNA, 201 bp, Homo sapiens
acacacctgagcattacaagcgagtagagtttctaggagcggtgactggggatggtttggttaacacaattttcagattctcaggttagaaaacagtgtayttgtatggagtatgggaatgtagtttatacaaaggaatgcaatgtgagtaaggaatgtcgtctgtatagagttccccagctgattctgatagtctttttt

SEQ ID NO: 41591 - DNA, 201 bp, Homo sapiens
cattttaggaaggcaggaattacaggcgaagacataatacgtggaaggtatatattgattctgtctctgcctgaaaactgggaaatctcgaagtggggggrtggcggaatggggagcttatgggtcataggtggattcaaagattttctgattggccgttgaaagagttaagctttgtctaaagactggaagtcagtagaa

SEQ ID NO: 41592 - DNA, 201 bp, Homo sapiens
gaaattgagactatggtgggacgagacattattaaaaaggtgcattagctattagatattactagataattagaataaaaattatggcgtgtatagagcamctatattatatccagcacagtatcttccttagatggatggatatttatatatgatttttatgtagtcaagagactttttctctgatgaaaagtacatttc

SEQ ID NO: 41593 - DNA, 201 bp, Homo sapiens
gatatgctactgaacaagaactttttttgttaatttccaaaaactccctaaaacgattaaaatgcttaaactctgggattttaattttaagtaggacacartttgatggggttattgctagaacatccgtgtttaaaagtatttccatacagtttaaaaaattcattaccttttttttttttttttgagacggagccttgg

SEQ ID NO: 41594 - DNA, 201 bp, Homo sapiens
gacaggaggatcctttgagcccaggagttcagaccagtctgggcaacataaatcctatctctacaaaaaaacaaataaaaaaatcagctgggtatggtggygcatgcctgtagtcctagctgcttgggaggccgaaatgggaagattgcttaagcccaggaggttgaggctgcagtgaaccgtgatcccgccagtgcattc

SEQ ID NO: 41595 - DNA, 201 bp, Homo sapiens
tacaacttctgtgtaagttattgttcttgcattacattagccattttgcatgatgctgtctgttaaagaatttgtgtaccaggaggttgttaaactggaaygtgttgtatttggatgttattgcatgttattttattccagtactggagagctaatattaactcatgacactgtgtactttggctttttgaaataataaac

SEQ ID NO: 41596 - DNA, 201 bp, Homo sapiens
cattaatttgacttataacatctttgcatgtttgatgaaaaaagctcttctcgatggaacaggccaatgtttattcttacatttttaagattaagcagtawtcatttcatattgggggcagcagtgttaacaattatgtacacttgtcatggatttcattaaaggtacttgacactaacaactctccatttaacaaaaaaa

SEQ ID NO: 41597 - DNA, 201 bp, Homo sapiens
tcctagacccaaatctaagccattgtctgcagctcttgtcttttaaacctcttaacaactacctgttttagttatatacctgttataattacatacttaaygtatgtgccttaagcaaatgtattcctgtaaagttttatgtaaataatgaatttaagtgtaatttaattttttttttgtagagataggggtcttactgtg

SEQ ID NO: 41598 - DNA, 201 bp, Homo sapiens
ggtaagagaaaggaatagatgtgttattattgattttctctggaattcacatttgagtaagactataaaacccccatatgtagaatggtggcagcatagamtagtgggagtaatggggagccatggactgtaactgtagagttaggcaagcctaaattctgattctatgttgttaggaggctgtctgctcgtgggcatttc

SEQ ID NO: 41599 - DNA, 201 bp, Homo sapiens
atttccttgatttgaggattgagttattccagagagaacttttctcttcttccttgttattttttttctaaaattagatgaaccagctgtgttttggtttstgggcatgatttgctgtctgttatccttttggtcttagtatctgggggaagaacaaagaacctgtgtgtgttttgaagaagaatgtattagtttctctgc

SEQ ID NO: 41600 - DNA, 201 bp, Homo sapiens
tttagatattttctctgtaagtaggcttttttttttttaaaggagtgattttcaaacttttgtgggatcttctaaaaacatattgtttatttggatttgasactgatggaatcagtatcccgcaggagatatttgaggctcttagtttttccatgttgtattctttgaatttccttgatttgaggattgagttattccaga

SEQ ID NO: 41601 - DNA, 201 bp, Homo sapiens
attttaaggaagagatatgctgcagttaccctgattggtgtggatggatggtgtataacggaaggtggctcagggaatctgggaagcccagcagaggcccyggggctcaggcacgtcagaagtgttaatggttcagctgaagtttagggacccgataaaaacccttaataggggcttcctcagaagtgaacatctgttttt

SEQ ID NO: 41602 - DNA, 201 bp, Homo sapiens
ttgcaccactgcactccagtctgggtgacagagcaagatcccgtctctaaataaataaatacattacttaaaattaagtaacttgttcaaggtcaatgtgsctacttagaagcatcatctctgtgtagtcccaaagtagtaagtcctccactttccccctattgcttatgtatttaacctcacattatggcttcaagtcag

SEQ ID NO: 41603 - DNA, 201 bp, Homo sapiens
tgctccagaagggcaaagtctggattcacacctgagtcatttgaccacgaagcccctgttttttccaccagaacagtttgccttggtttcagttcacttgktggactgtttaaaccggcaaaactggtattatgtcaaagaatgtaattcaaggtttgacaaaagcatccaggagtagatatgataggccgtgaatgtagt

SEQ ID NO: 41604 - DNA, 201 bp, Homo sapiens
ccaacctcaaagtactttctgcctttcaaatttagatcttcaattcattacagtaccaggtttcattgaatctaaaatatcatgaattctaaggtacacarttaatattttatatactgctaagaaagaaaaaagtcactgccaattaagtaatgacacatcatcaaatgctaaatacatctcaattttaaacgtgttaat

SEQ ID NO: 41605 - DNA, 201 bp, Homo sapiens
tgaaggcaggtcaaggacttagagtgttaatggaaaaagcaaactgtaaaatatttaaagaggtttattcagagccaatatgaacgactatggcccgatgracagtctcaagaagtcctgagaaagtgtgtgtgaggtggttgggttataatttggttttatacattttaggaaggcaggaattacaggcgaagacataat

SEQ ID NO: 41606 - DNA, 201 bp, Homo sapiens
agtatcaaaacacattttacatatattctaataccttatatacattctgacaattataaaactgtatattatgtcaatttacctcttctttcaaaagaaadcaacaaaaacaaaacttaataattttcagctgccctcctagaaaagactcccagaacagcttaaaaataaaaggattttttttgtttattgattggtagt

SEQ ID NO: 41607 - DNA, 201 bp, Homo sapiens
aatagtagtaaactattgctaaattagctgatcattacttaagaaataattctttttgagataagaggcttgctctgttgcccagtctggagtgcagtggyatgatctcggttcactgtaacctccgcctcccgggttcaagcaattctcctgcctcagcctcccgagtagctgggactacaggtgtgtaccaccatgccc

SEQ ID NO: 41608 - DNA, 201 bp, Homo sapiens
ggagaatggagtgaaccgggggggcggagcttgcagtgagccgagatcgcgccactgcactccagcctgggtgacagagcaagactccgtctcaaaaaaaataaataaataaaaataaaagtggtggggcatggtggctcctgcctgtaatcccagcactttgggaggccgaggtgggcggattatttgaggtcaggaggt

SEQ ID NO: 41609 - DNA, 201 bp, Homo sapiens
attaatgtagagtcggctgtacgggacactggagttttatgattactcaaatcagtctctctgaaaactcggagatctgaatttttaaggataatttggtdggggcttgggttggagatgaaatcatagggggtcaaaattgagtttttcttgcttgcttctgttcctgtgtgggagcacagaactggctgggccggatta

SEQ ID NO: 41610 - DNA, 201 bp, Homo sapiens
caaagaaaaaaaaaacacccaaaactaaaaaggaagtttgacataaaaaaaagtgtatcacagggacagattataggcagttgcatggagatagtccataagagctggctgtctttctcagtcattaactatattttgaagtcttgtaccacgaataataggtgctttttttcttttaggacatggttcttggagaatatg

SEQ ID NO: 41611 - DNA, 201 bp, Homo sapiens
ggcaataacatatatataggcaataaacatatatgtttattgaaactataaacacatatactaacaatagttgcatgggtataacaggagcagacaaaccrtattcataaagaatagggcgaaaggtgaaatgcataaacacatattattgtggttggtaattgtgcacccagctttgttactgcagtcatctgaaatact

SEQ ID NO: 41612 - DNA, 201 bp, Homo sapiens
aaaaagatatttatttacattttaaaaaggggatttgagaaacgtataaaaacatgacagaactcttcataggccacttttcacaataaaataggcaatawcatatatataggcaataaacatatatgtttattgaaactataaacacatatactaacaatagttgcatgggtataacaggagcagacaaaccgtattcat

SEQ ID NO: 41613 - DNA, 201 bp, Homo sapiens
agtagtaaggcaaataaatgattttaatacactgaaccacaccacatcataatcaatgttataaaaacaagaaagcatagtaacttgtaatgttcattgtsaattttttttgagaaaattgtccaagcatttaaaaataactgaaatgtaaaatgttttaaaatgttaaagaggcagggtgcggtggctcatgcctgtaat

SEQ ID NO: 41614 - DNA, 201 bp, Homo sapiens
tagagtaaagagaaaagcagacagacagcagtagaaacaaatgagaggtgcactctaaaaggccagaagacctggtttctgttttcctttcttttttttttgagacagagtttcgctattgtcacccaggctggagtgcaatggtgcgatctcggctcactgcaacctccgcatcttggtttcaagtgattctcctacctc

SEQ ID NO: 41615 - DNA, 201 bp, Homo sapiens
ccccatatgtagaatggtggcagcatagactagtgggagtaatggggagccatggactgtaactgtagagttaggcaagcctaaattctgattctatgttrttaggaggctgtctgctcgtgggcatttcgtctctcttctgaaattctcatctgtagaatggaagtaatgtgtatgttgtatgattagagatgatataaa

SEQ ID NO: 41616 - DNA, 201 bp, Homo sapiens
attgtaaaatgttgacaaattctaaatttaatagttgtattagagaaaaaaacccaagttgccattatgtatttttttttccagctgaatttttggttgcyagatttcttaattggaagctcattaattcttgcttttcactggggacttcattagttatgcatagtgaccatttttttaatccctctgcagatcagctct

SEQ ID NO: 41617 - DNA, 201 bp, Homo sapiens
tcaaggggcttaagttatgaaatactaaagtaaggattaatgatagatactggttaatgttacttttattaattttattaaatatttaaattgagtaatcraacaagtttttataatagtcagtttttaatgcttctacatttgtaagcccgatattttttactcttcttaaaatgaatgagatgatttatatttttagca

SEQ ID NO: 41618 - DNA, 201 bp, Homo sapiens
ttaggaaggcaggaattacaggcgaagacataatacgtggaaggtatatattgattctgtctctgcctgaaaactgggaaatctcgaagtggggggatggyggaatggggagcttatgggtcataggtggattcaaagattttctgattggccgttgaaagagttaagctttgtctaaagactggaagtcagtagaaagaa

SEQ ID NO: 41619 - DNA, 201 bp, Homo sapiens
tatttaatgtttaacttgtatattctcaagttctggaaaatttctagtacaatcttttcgtgtccagtaacttttatgtttctccttctagtttctgcagwcctgactttcttcttctttttttcttctgagttggtatagagtctaacaaatgagcacattagatgcaagttcttttaggagagaaaacaaattttcttc

SEQ ID NO: 41620 - DNA, 201 bp, Homo sapiens
agtgcacactttcatttgttctccaaatatggatttatatagtgtttttaattaagtaaatgtaaattatcattttttcatctagtcatttattcaagggrtattttattgagcatcaactgtatgccaggctcttacaactcaggaaaagggagagagagggatgtatattaattgctgtctgttctattgctgggcaaa

SEQ ID NO: 41621 - DNA, 201 bp, Homo sapiens
agcttcctatttaaagggtcccagtgataatttcttttgtaaagagaagaatctttgtataaaacaaatgattgtttcctagattatattaataaaatacrgatttttcacacattacttttgcataaacatagttctagctaaatacatatttgatataaacatgccaaaatgaaatttgatcttatattgtgcttcata

SEQ ID NO: 41622 - DNA, 201 bp, Homo sapiens
ggcaagtgcctgtggtcccaactacttgggaggctgaggcaggagaattgcttgaacccaggaggtggaagttgtagtgagccaagattgtgccactgcaytccagcctgggtgacagagtgagattccatctgaaaaaaaaaaaattcttaataaaaactgttgttttaaaaaaatgcattttgagacagcatatctgtt

SEQ ID NO: 41623 - DNA, 201 bp, Homo sapiens
caccgcgcctggcctgttgtctctacttctaccacaccaaacaaccttctacccgcatccctgcctttggcatctcccactctttttttttttttttttttgagacgaagtcttgctcaggctggaatgcagtggcgcgatctcggctcactgcaacctctgcctcccaggttcaagcgattctcctgcctcagcctcctg

SEQ ID NO: 41624 - DNA, 201 bp, Homo sapiens
ttggggagggatggagttttgcttttgatgtaatacgtattttaaactttataattctctaccttttgttcaaaggtagagaattattattattattattaattttttttccttttctacaacagttttagcataacacatacaaaggattataaaattgtaaagccgagtgtatcttagacatcatgcaatataatctct

SEQ ID NO: 41625 - DNA, 201 bp, Homo sapiens
tttggggagggatggagttttgcttttgatgtaatacgtattttaaactttataattctctaccttttgttcaaaggtagagaattattattattattattaattttttttccttttctacaacagttttagcataacacatacaaaggattataaaattgtaaagccgagtgtatcttagacatcatgcaatataatctc

SEQ ID NO: 41626 - DNA, 201 bp, Homo sapiens
atttggggagggatggagttttgcttttgatgtaatacgtattttaaactttataattctctaccttttgttcaaaggtagagaattattattattattattaattttttttccttttctacaacagttttagcataacacatacaaaggattataaaattgtaaagccgagtgtatcttagacatcatgcaatataatct

SEQ ID NO: 41627 - DNA, 201 bp, Homo sapiens
ttcccttgagctgctggtataactttccttgttctgtgtaatagctcagcaaaacccagcagctcagattcctgccaggcagcgggagattgaaatgaacygacagcaacgcttcttccgcatcccattcatccgccctgccgaccagtacaaagaccctcagagtaagaaaaaaggctggtggtatgcccattttgatgg

SEQ ID NO: 41628 - DNA, 201 bp, Homo sapiens
tgagtacttgtgtctggcacatagtaatcattataagtgctttaaatgagtaagtacaattaaaatacagattgctcccaatttaaaatgaaaaaaaaaaattcaagcaaaattagatatgttcttaatgtgcattaaaattttttgtttttttttgaaggattggaaaatttgttttgaaaacgtaatgaatgttagcat

SEQ ID NO: 41629 - DNA, 201 bp, Homo sapiens
ccatgtggctcttcttggctttatatcatatgtacattttacaatatttctttgacacacttggattttcatagtgagactcttaactgagctgctgtaartggttgttccacttttgaagttctgtgagtataaaacagattaaacaggctaaccaaaattatgctgctaaagatgtaaagtcattgccccagggaaatg

SEQ ID NO: 41630 - DNA, 201 bp, Homo sapiens
ggaatattttaagcacatatctttaatattattcatccaggaccaaagtaagtcctgatacaggaaatgagtgagtttcacagcttcctgagcccctactygacccaggaaggccagcgggcacctcctctcactagcaatagtgtgcatatagggaaagagcacaagaagacaggaaaaaaaagaagattaaaaaaagtg

SEQ ID NO: 41631 - DNA, 201 bp, Homo sapiens
acactgaactgtaagtagctctgggaaaacaggagcaaaagaatagataagcagatgtctgttaatatgtgatgcagcttttaaagttactaacaaaaccrggcctctcgttccttcatagggatatatagctttgctaactgctttttgctttctctggtttgcaaagaaataaattcaactgctataaagcttttgcta

SEQ ID NO: 41632 - DNA, 201 bp, Homo sapiens
taacttgtatattctcaagttctggaaaatttctagtacaatcttttcgtgtccagtaacttttatgtttctccttctagtttctgcagacctgactttcttcttctttttttcttctgagttggtatagagtctaacaaatgagcacattagatgcaagttcttttaggagagaaaacaaattttcttctcattttttct

SEQ ID NO: 41633 - DNA, 201 bp, Homo sapiens
tataagagacagggtttcactatgttggccaggctggtctcgaactcctgacctcaggtgatctgtccaccttggcctcccaaagggctgggattataggygtgagccactgcacccggcctagaaataatttttaactgcagtatattaccttatccacagattacctgtctaattgatgtgtaatacttgtgtgcagag

SEQ ID NO: 41634 - DNA, 201 bp, Homo sapiens
ttaacttgtatattctcaagttctggaaaatttctagtacaatcttttcgtgtccagtaacttttatgtttctccttctagtttctgcagacctgactttcttcttctttttttcttctgagttggtatagagtctaacaaatgagcacattagatgcaagttcttttaggagagaaaacaaattttcttctcattttttc

SEQ ID NO: 41635 - DNA, 201 bp, Homo sapiens
tatatgatttttatgtagtcaagagactttttctctgatgaaaagtacatttcacctgtctaatacgtacaatgtgcctgtagtctgagatactagggaarctgaggtgggaggacagcttgagcctgggagtcgaggctacagtgagttgttagcatgccactgcactccagcctggccaaaagagcaagatcctgtgtc

SEQ ID NO: 41636 - DNA, 201 bp, Homo sapiens
tttaacttgtatattctcaagttctggaaaatttctagtacaatcttttcgtgtccagtaacttttatgtttctccttctagtttctgcagacctgactttcttcttctttttttcttctgagttggtatagagtctaacaaatgagcacattagatgcaagttcttttaggagagaaaacaaattttcttctcatttttt

SEQ ID NO: 41637 - DNA, 201 bp, Homo sapiens
ggatgaagaaaatcgccttccccagccaagtgatcaacactttacatctgcagttcaccaaaagcacaaggatcattttcgactcactgtgagttttgccrttctgaaattgagactatggtgggacgagacattattaaaaaggtgcattagctattagatattactagataattagaataaaaattatggcgtgtatag

SEQ ID NO: 41638 - DNA, 201 bp, Homo sapiens
ttatttgaaacagtccattgaaaatgcttaccaacattgtccctgctcccttctcttttatttttttcccaaagattctagggtggaagaaaaaaaaaaaaccatgtatatagttgtcttgtttttactgtattttagcatttaattataatggagaaggaaagatagaggcattgattgtctaaaatattaatttatccc

SEQ ID NO: 41639 - DNA, 201 bp, Homo sapiens
attatgcagaaaaaaatcttctaaagcacttgtattttaagtaatttttgtgcttaatttagattgctttaatacctgtgctttaaaaaattgttggccgrgtgcggtggctcatgcctgtaatcccaacattttgggaggctgaggccagcagatcacttgaggccaggagttcgagaccagcctgggtaacatggtgaa

SEQ ID NO: 41640 - DNA, 201 bp, Homo sapiens
tgaatctcccaaatgaagaatgtttcattatcagtcattctgagctctgttttgaacaaatcagtgatattgcttaggaataaacctctcatttttgaagkataaataactgactattttatcctgataaatttagggtaatttttagttaaattttccagttatattacacttttccaataggtgagaagattaattctc

SEQ ID NO: 41641 - DNA, 201 bp, Homo sapiens
cttactttttctttttttaattaacaagaataatgtatatttatacagtacattggaatacaatgtaatgtttgatacatgtatacattgtggaataattmaatgaatatatttatcattacctcatttaaaaaaactgtaatgttgattcaagtattgatattccctcctttttcactcaatttttgtctttttctaata

SEQ ID NO: 41642 - DNA, 201 bp, Homo sapiens
gaagtgcttcttataatttataaggctgtatttgaagattacacaattgaatgtgaaggaaagttatttagaatattagtttcaagcttttaatgtctgtktctttgtgtttttccagataagtattcgtttctagtcttccccaacaaaatttcagttctcctgttagtaagaaaagctatcaaagactttctatttagt

SEQ ID NO: 41643 - DNA, 201 bp, Homo sapiens
cccaggtagaagcagagcactcaggtgcctaactcggacttggacactccgtgatagttttattttctcttttgtaaacacgcttaaaattcagtgcaggrggagcgcagtttgctctgagatgtgaagatcaaatgataccattaatagtctaatcatgtaggagaccagatcgagactttctaaagccttattcttagt

SEQ ID NO: 41644 - DNA, 201 bp, Homo sapiens
atattacagtgcatacttgaatcatttttttggaacagaaaattggatgttaagtaatatttattaaaacgcagaatttttctgtggcaaaatatttctacagtgggctctgatagaaacagattttttaaagaaagtagaggggttggcacagttcagttgacagccagttgatggacaaagaggagccttgtcctagtg

SEQ ID NO: 41645 - DNA, 201 bp, Homo sapiens
tcacccaggctggagagcggtggcacaatgtcggctcacttcaacctccacttcctggggtcaagcgcttctcctgcgtcagcctcctgagtagccgggawtacaggcatgcaccaccatgcttggctaatttcatttgtatttttagtagagacggggtttcttcatgttggtcaggctgatctcgaactcccgacctca

SEQ ID NO: 41646 - DNA, 201 bp, Homo sapiens
atagaggcagaaaaagctttctgtaaaatccagcatcccttcataataaaaaccttcaacagactaggcatcaaaggaacataactgaaaataatgagttrtctatgataaacccatagccaacattggactgaacaggcaaaagctgaaactattctccttgagaacaggagcaagacaagaatgcttactcacaccact

SEQ ID NO: 41647 - DNA, 201 bp, Homo sapiens
tgacaattatgtgtcttggagttgctcttctcgaggagtatctttgtggcgttctctgtatttcctgaatctgaatgttggcctgccttgctagattgggkaagttctcctggataatatcctgcagagtgttttccaacttggttccattctccccgtcactttcaggtacaccagtcagacatagatttggtcttttca

SEQ ID NO: 41648 - DNA, 201 bp, Homo sapiens
ttattgaggatttttgcatcaatgttcttcaaggatattggtctaaaattctcttttttggttgtgtctctgctaggctttggtatcaggataatgctggyctcataaaatgagttagggaggattccctctttttctattgattggaatagtttcagaaggaatggtaccagttcctccttgtacctctggtagaattcg

SEQ ID NO: 41649 - DNA, 201 bp, Homo sapiens
ttttatggttttaggtctaacgtttaagtctttaatccatcttgaattgatttttgtataaggtgtaaggaagggatccagtttcagctttctacatatgdctagccagttttcccagcaccatttattaaatagggaatcctttccccattgcttgtttttctcaggtttgtcaaagatcagatagttgtagatatatgg

SEQ ID NO: 41650 - DNA, 201 bp, Homo sapiens
gattaaaaagataaataatacacagtccctgctcttgatcaacttagatgtggtgggaaacgcacacacacacacatgcacacacacacacacacacacacctgagcattacaagcgagtagagtttctaggagcggtgactggggatggtttggttaacacaattttcagattctcaggttagaaaacagtgtacttgta

SEQ ID NO: 41651 - DNA, 201 bp, Homo sapiens
aattttctcccattttgtgggttgcctgttcactaggatggtagtttcttttgctgtgcagaagctctttagtttaattagatcccatttgtcaattttgkcttttgttgccattgcttttggtgttttagacatgaagtccttgcccatgcctatgtcctgaatggtaatgcctaggttttcttctagggtttttatggt

SEQ ID NO: 41652 - DNA, 201 bp, Homo sapiens
ggattaaaaagataaataatacacagtccctgctcttgatcaacttagatgtggtgggaaacgcacacacacacacatgcacacacacacacacacacacacctgagcattacaagcgagtagagtttctaggagcggtgactggggatggtttggttaacacaattttcagattctcaggttagaaaacagtgtacttgt

SEQ ID NO: 41653 - DNA, 201 bp, Homo sapiens
agtactcaagttgtgtttagaaattcttcatggttggcactatttggtaagttgtgttttctcctgtattatttccctgtggatcatatatgttaattatrtttaatttgttttgtcatagtatttaaaccgaggctgcactagatactttgctaacaaagaaactgacaaacagattttacagaaccgcaaaagtcctga

SEQ ID NO: 41654 - DNA, 201 bp, Homo sapiens
ctcccaagtagctgggactacaggcacgcaccaccacactcagctaatttttgtatttttagtagagacggggtttcaccatgttggccaggatggtctcratctcttgacctcgtgatccacccgcctcggcctcccaaagtgctgggattacaggcgtgagtcactgtgcccggcctgttttatgtattttttttaaac

SEQ ID NO: 41655 - DNA, 201 bp, Homo sapiens
ccacatttccatgaaagtaaaggaagcatttcttttttactatggtttttaaaaaaggaataaattactaggaattacatgaaatataataatgatgatayggttttgtcaatacttagctgacaataaagtgatgtgactgttctggccttaatctagcatttcttcctgcttggagggttgggagtatagtatttttgg

SEQ ID NO: 41656 - DNA, 201 bp, Homo sapiens
ttacgataatttgcctccttatttctatttccctatagtctgcctcctaatgtgttctctttgctgccattaaattaaactctctgcattgtgttttttttgtttgtttgtttgtttggtttggtttgtttttttttgaaaacagggtcttgctctgttgcccagtcacccaggctgtagggcagtggtgcaatcatagct

SEQ ID NO: 41657 - DNA, 201 bp, Homo sapiens
atgaggtgattcagacatgtttcaaatgcagaaggtagtgatcatgtatcaatcagtattttttggtgaaaacagtagaaggcttgatcttcagctgcatycagagggattttagactagtttgttagtttattcattgagagttgtttgcctgctatgtagaggcacaatgccaggattgagagatggatttgtgagcag

SEQ ID NO: 41658 - DNA, 201 bp, Homo sapiens
cctaggctggtttcgaatttctgggctgggcttgagcaaccctcctgccttggcctcccaaaatgctgggattataggcatgaaccaccatgcttggcaamcaggttgacttttttctggtaaaaaaatacttaagtaaaagttgtcaaccatttctaagtgtatagcatagtagcattaagtatattcacgttgttgtgc

SEQ ID NO: 41659 - DNA, 201 bp, Homo sapiens
gttcactaggattttaaaacccattattctgagagccttaggtaattctgtaaactcttaatttgttaaatttcactggatatacatgtaaaaatgttaamtatggagactattaatatgtgaaatgttttagaaaagtaagtcaaataatacatctcttgcctatattttctcacaagaggtttgctgttttatctaagt

SEQ ID NO: 41660 - DNA, 201 bp, Homo sapiens
cgcttgagctcaggagatcgaggctgcagtgaggtgaagtcatgccactatacttcaacctgggtgacagagagataccctgtctcaaaaaaaaaaaaaaagaaaaaagcgctgctgataaattggacaaagggatgtgtgcgctcttgtatatggtttgcattctccccttagagtaaaagccgtttctgaagtcttctt

SEQ ID NO: 41661 - DNA, 201 bp, Homo sapiens
tagtgggagtaatggggagccatggactgtaactgtagagttaggcaagcctaaattctgattctatgttgttaggaggctgtctgctcgtgggcatttcrtctctcttctgaaattctcatctgtagaatggaagtaatgtgtatgttgtatgattagagatgatataaagtgctttgcacagcatctaatgactcttaa

SEQ ID NO: 41662 - DNA, 201 bp, Homo sapiens
agtgacagctgggagatagaacttatttattctattccaaaagagtatacttgccatcttctagttatatgtagttttaagacttttctccctgattttttcaaaatcaactaaataaagaacatatttaagtttaaatgtggctattcttgattagaaatatatttagaggcaaaatttactcaatcagctgactcatgt

SEQ ID NO: 41663 - DNA, 201 bp, Homo sapiens
taaaccctgaagtctggggagcccgtaaccctcttgccatggctgtgaaagttgggcacatacatatatgacattagcagttatttctgaatgcattttcstatagaatcattattataaattgtggcttgttttatattaccattaatatacttaatgcacatgatgggttaattttgcttttgtggcctgtcctacaaa

SEQ ID NO: 41664 - DNA, 201 bp, Homo sapiens
ctggcttaatgaaaatttcaaaaaacatattttcctttgcattttgaatctgactttgtgctggggattttgtttgaatttaatgatagaccaaaatgcarttactgtacacattaccttaatgtgtgtcagtttaaaatagttttatattgtcatagattttgtggatttatcttggtttcttataccaagataaattct

SEQ ID NO: 41665 - DNA, 201 bp, Homo sapiens
ttatttttttaagaggaaaaaaattaaatagaatttctgttatttatttgtcatatgaaaattgtctctttatatgcagtttgcttaaaaactttaagaartatctaaaatatactgagttacatgttgaatctcccaaatgaagaatgtttcattatcagtcattctgagctctgttttgaacaaatcagtgatattgct

SEQ ID NO: 41666 - DNA, 201 bp, Homo sapiens
catttactttccattggatcttttttgctaccattagagaatgaatgcaatttaatgttttatgtgaccatttagacctttaaatattgaaatacattaawgcaacatgggtgtttttacttttcatgtaacaattgtcttcttacctttaaaaaagtagcttcttaaataatagttaaaattttatggtatatttgttag

SEQ ID NO: 41667 - DNA, 201 bp, Homo sapiens
tcctgtgtttgtgtcttcattctcaagttgacagccttgaacactgatgctgctgctttctcatttctcgtatagttctaggacattatatgtattgtgcrtgtatgtatgctgttaaacatatgtatgtgtttaactttgataggtttgtgagaactagaattagattgtaatgttcctggttgggatagaactttaaaa

SEQ ID NO: 41668 - DNA, 201 bp, Homo sapiens
ataaatataaagaatagttaatcgttagtactttctctgtaccagacactattccaagcatttcacatacataacctcattaatctaaatagcaaccatgtaaggtaggtaaagtaattatcccagttttatggacgaagaaactgtgcacaaagagaataagtaacttattcaaggtcacatagctagtagttgtagagc

SEQ ID NO: 41669 - DNA, 201 bp, Homo sapiens
tctgatgaaaagtacatttcacctgtctaatacgtacaatgtgcctgtagtctgagatactagggaagctgaggtgggaggacagcttgagcctgggagtygaggctacagtgagttgttagcatgccactgcactccagcctggccaaaagagcaagatcctgtgtcaaaaaaataaaagtacaatgagaattacctgct

SEQ ID NO: 41670 - DNA, 201 bp, Homo sapiens
cctgtctcaaaaaaagaaaaagaaattgtcatttaataagaagaggatcactatgaacgaaacaaatttaaacggggagctaggaggtcagtttaggataygaaaagtttgagatggctgttgatttcctaagtagtgatattgaataggctatgtgctctagatgtctggagttaggagagaggtataagttggagatag

SEQ ID NO: 41671 - DNA, 201 bp, Homo sapiens
ccagctacttgggtggctgaggcaagaggactgtttcagcctgagttcaaagtcagcctgggcaacatagcaagatctgttttagaaaagaaaagaaaagraaagcatagatggcaaattatttgagcaatattgagatgttgtttattgtgaaataaacaatttcacattaaacatttatgaaaactctctaacagcaaa

SEQ ID NO: 41672 - DNA, 201 bp, Homo sapiens
ctgatggagggtttatatttgctatgattaagctgaagtaggctaaggtgtcagatttcttactggagtaatacccagcctgggtgacagagtgagaccckgtctcaaaaaaagaaaaagaaattgtcatttaataagaagaggatcactatgaacgaaacaaatttaaacggggagctaggaggtcagtttaggatatga

SEQ ID NO: 41673 - DNA, 201 bp, Homo sapiens
atttgtctttctgtgactggcctattttatttaactcaacttaagattcatccatgttgtagtatgtgtcagaatttccttccttttatttttattttttwgtattttggatcccatccttcctttttaaggctgaatactattttattgtagatctgtggtacattttgtttatccatgcatttgtcaatggacatttag

SEQ ID NO: 41674 - DNA, 201 bp, Homo sapiens
taaaaatacattttaaactttattctcttattttaaaaaattagttttttttctgaagaaaggtcaaatatatatgtgaagtcagattattttataaatayatagaattcttgactatttaaaaattaagattatcttacagtttcaagaaagtgaaaataagtggtaatagtggagaatttttcttaggattaaagatta

SEQ ID NO: 41675 - DNA, 201 bp, Homo sapiens
tggaattgtagtgtgttaaagttgttatatccatactaagatatattttaatttgagatgatgctttatttggatcactccaatatgtatatgtattacaraaaatctagtgaaattaatgttttatcaaattacttgcattaagaaaatgactagcattttaaactgagagtatgtacaattcttattgtagcaaaactc

SEQ ID NO: 41676 - DNA, 201 bp, Homo sapiens
agctgcttgggaggctgaggcaggagaatcgcttgaacctgggaggcggagattgcagtgagccaagattgtgccactgcactccagcctggtgacagagygagactccatctcaaaaaaaaaaaaaaaaatgaaaaaagaaaactaaagttggagcaaaaagaaaatggccgggcacggtgggtcacgcctgtaatccca

SEQ ID NO: 41677 - DNA, 201 bp, Homo sapiens
ggtggcatgcacctgtaattccagctgcttgggaggctgaggcaggagaatcgcttgaacctgggaggcggagattgcagtgagccaagattgtgccactrcactccagcctggtgacagagtgagactccatctcaaaaaaaaaaaaaaaaatgaaaaaagaaaactaaagttggagcaaaaagaaaatggccgggcacg

SEQ ID NO: 41678 - DNA, 201 bp, Homo sapiens
cctgtctcagccccctgagtagctgagactgcaggcatgcactagcatgcctggctgatttctctattttttttttttttttttgtagagatggggttttrccatgttgcccaggctggtcttgaactcctaggctcaagcagtttgcctggcgtggcctcccaaagtactgggattataggcatgagccactgcacccag

SEQ ID NO: 41679 - DNA, 201 bp, Homo sapiens
tgcagcctcaacctcccaggctcaagtgatccttctgcttcagcctctcaagtagctggaactagaggcatgtgccaccacgcccagctaattaaaaaaawttttttttgtacagacaggatctcactgtgttgctcatgctggtctcctggtctcaaactcctgggctcaagtgatcctcctccctcagccttccaaagt

SEQ ID NO: 41680 - DNA, 201 bp, Homo sapiens
tcctgggaggcggagcttgcagtgagccaggattgtgccaccgcactccagcctgggtgagagagtgagattccgtctcaaaaaaaaaaaaaaaaaagtarataaagggggcagagttcagcaagaggcaagggaggaggtggggattttatgtggcatgggcagatgtgtttgttagttgggacttacatgtgaactttt

SEQ ID NO: 41681 - DNA, 201 bp, Homo sapiens
atatacatatatacacatatgtacacatatatacacatatatacacacacatatatatatacacacacacatatatatatatatatatatatatatatttwttttttttttttttttttgagacagagtctcactctgtcaacccaggctggagtgcagtggcatgatcttagctcactgcaacctctgcctcgttggttc

SEQ ID NO: 41682 - DNA, 201 bp, Homo sapiens
tatggacaccgaggttgattccatgtctgttgtgaatagtgctgtgatgaacatacaagggcatgtgtcttttctttttctgtgtgtgtatttatttattyatttaattttatttttttgagacagagtcttgctctgtcacccaggctggagagcggtggcacaatgtcggctcacttcaacctccacttcctggggtca

SEQ ID NO: 41683 - DNA, 201 bp, Homo sapiens
gtttgctttttatttttttaagaggaaaaaaattaaatagaatttctgttatttatttgtcatatgaaaattgtctctttatatgcagtttgcttaaaaastttaagaagtatctaaaatatactgagttacatgttgaatctcccaaatgaagaatgtttcattatcagtcattctgagctctgttttgaacaaatcagt

SEQ ID NO: 41684 - DNA, 201 bp, Homo sapiens
aaggagagattaaactttttttttttctttttttttgagatagagtcttgctctgtcacccaggctagagtgcagtggcttgatctcggctcactgcaacrtccgcctcccaggttcaagtgattctcctgccccagcctcccgagtagagtagctgggactataggtgcacaccaccacacctggctaatttttgtattt

SEQ ID NO: 41685 - DNA, 201 bp, Homo sapiens
ggcggatcatctgaggtcaggagttcaagaccggcctcgccaacatggcaaaaccctgtctctactaaaaaatacaaaaattagctgggtgtggtggtgcrcacctgtaatcccagctacttgggaggctgaggcagaagaatcactgtaacccaggaggcggagattgcagtgagtcgagattgtgccacagcactccag

SEQ ID NO: 41686 - DNA, 201 bp, Homo sapiens
gaaaatgactagcattttaaactgagagtatgtacaattcttattgtagcaaaactcttaacatagcagctgaccttttagaataaagactaacttttagrtgctggtttttggttactgtattttcaaacactgatggtgtctgcatttctgccaaaggtattttagttttatagataatgtgatagtgtataaaggttt

SEQ ID NO: 41687 - DNA, 201 bp, Homo sapiens
tacattgggtgtgacttagaattgaggtagtcccagcagcgtggattttactcattatagttgtagctttacacacacacacacaaacacacacacacacmcccctataaatattattttaaaataattgaaccatttttccctgcagttttctttgatacaattagaaacttcagccacaagagtaattgtcattgtttg

SEQ ID NO: 41688 - DNA, 201 bp, Homo sapiens
ataacagttttctacattgggtgtgacttagaattgaggtagtcccagcagcgtggattttactcattatagttgtagctttacacacacacacacaaacacacacacacacacccctataaatattattttaaaataattgaaccatttttccctgcagttttctttgatacaattagaaacttcagccacaagagtaat

SEQ ID NO: 41689 - DNA, 201 bp, Homo sapiens
ctttgaaagatatcttgttctctgactgtgctttcatagacctccatccatacataattgtagacagtgttcattacgagaaaagaggaatacaggagtgytctactcctttagtcagggtcccagctcttggcaggcattcaggaaattgcacctggaagcaagtacacccatcttcttttcttatgattttactgattt

SEQ ID NO: 41690 - DNA, 201 bp, Homo sapiens
gcataacagttttctacattgggtgtgacttagaattgaggtagtcccagcagcgtggattttactcattatagttgtagctttacacacacacacacaaacacacacacacacacccctataaatattattttaaaataattgaaccatttttccctgcagttttctttgatacaattagaaacttcagccacaagagta

SEQ ID NO: 41691 - DNA, 201 bp, Homo sapiens
taatgtcaaggtgacattttttaaaaaacatctcactaatatgtttaccataattttcaagattatctgtaggaattacattgtcccattataaattagtstatttcttatttgaatctttcatttttaatttacacttttaaaaattggaagtctgaatatctctattgatccatcacaccttttcaaagagactagatt

SEQ ID NO: 41692 - DNA, 201 bp, Homo sapiens
aattagctgggtgtggtggcagatgcctgtaatcccagctactcgggaggctgaggcaggagaatggcgtgatcctgggaggcggagcttgcagtgagccrggattgtgccaccgcactccagcctgggtgagagagtgagattccgtctcaaaaaaaaaaaaaaaaaagtagataaagggggcagagttcagcaagaggc

SEQ ID NO: 41693 - DNA, 201 bp, Homo sapiens
cttgatgtatgtgtaattatatgtccacactcacatttcataatatgacctagatagggagctgatactttaaagagaagaggaaagactcgtggggattrgttttgatgatactaatgctaaaattaaaacattgattgaaactgctagagttaaggatatctctatactctaaaaggaatacaactgaataaaggtaaa

SEQ ID NO: 41694 - DNA, 201 bp, Homo sapiens
atatggataaggacaaagataaaaatcgaagaggttaaataacttacttaagagcttgttagaaagtggtggagctgagtttcaagcctaggtttttttttctgttttttgttttttgtttttccagagacaaggtcttactctgtctcccaggctggagtgcagtggcacaatgatagcttactgcaactttgaactcct

SEQ ID NO: 41695 - DNA, 201 bp, Homo sapiens
tgaaatataataatgatgatacggttttgtcaatacttagctgacaataaagtgatgtgactgttctggccttaatctagcatttcttcctgcttggaggsttgggagtatagtatttttgggtttcagaatgtacagcctttcctggtacaatggcaggcatcctgaaagggcagctattgaaatatatctggtcagagg

SEQ ID NO: 41696 - DNA, 201 bp, Homo sapiens
ttagccgggcatgtgcttgcctatagtcccagctactctggaggcagtggtgggaagatcgcttgagctcaggagatcgaggctgcagtgaggtgaagtcrtgccactatacttcaacctgggtgacagagagataccctgtctcaaaaaaaaaaaaaaagaaaaaagcgctgctgataaattggacaaagggatgtgtgc

SEQ ID NO: 41697 - DNA, 201 bp, Homo sapiens
atatatacatatatacacatatgtacacatatatacacatatatacacacacatatatatatacacacacacatatatatatatatatatatatatatatwttttttttttttttttttttgagacagagtctcactctgtcaacccaggctggagtgcagtggcatgatcttagctcactgcaacctctgcctcgttggt

SEQ ID NO: 41698 - DNA, 201 bp, Homo sapiens
tttagtaatgcattggtttgagggaatatggtctgagtcacaaatccatagagctactattatgcagggatggaaagtggctttttaatggagttgaccartctgttcctaatatgagtaattagtgatatttacaaggtagcttgaatcctgataggcagagcacactggtgtttttcgttttgttttcatggaatgtgt

SEQ ID NO: 41699 - DNA, 201 bp, Homo sapiens
taaataaactagcttttatttttagctttttactgcgaaaaaacaagtgtttggaatgattctttaaaaatgtgtggaggatgggtgtggtggcttatgcstgtaatccaagcacttcggggagggcggatcgcttgagcctgggaagtcaagaccagcctgggcaaacatgcaaaatcttgtctctataaaaaaaatgaa

SEQ ID NO: 41700 - DNA, 201 bp, Homo sapiens
ttttattttgttattgtttaacaattctgatgtctagttaaagtttagtaatgcattggtttgagggaatatggtctgagtcacaaatccatagagctacyattatgcagggatggaaagtggctttttaatggagttgaccaatctgttcctaatatgagtaattagtgatatttacaaggtagcttgaatcctgatagg

SEQ ID NO: 41701 - DNA, 201 bp, Homo sapiens
taaagatggggctgttcattatttttgaacgaagaaaacacatggcttctttgacacttactagatcaaatgacagtcttaatctattatatcactatcartttgcctaattgtacttacttaattctgactaaattacatttagtctctgccatctgtccaagtagtgacagctgggagatagaacttatttattctatt

SEQ ID NO: 41702 - DNA, 201 bp, Homo sapiens
cccaggctcaagtgatccttctgcttcagcctctcaagtagctggaactagaggcatgtgccaccacgcccagctaattaaaaaaaattttttttgtacaracaggatctcactgtgttgctcatgctggtctcctggtctcaaactcctgggctcaagtgatcctcctccctcagccttccaaagtgatgggattatagg

SEQ ID NO: 41703 - DNA, 201 bp, Homo sapiens
gactttgagaccagcctggccaacatggtgaaaccctgtctctactaaaagtacaaaaattagttgagcatggtggtgggcgccggtaatcccaactactygggaggccgaggcaggagactcccttgaacccaggaggcggagattgcagtgagccgagatcacgctgttgcactacagcctgggtgacaagagtgaagc

SEQ ID NO: 41704 - DNA, 201 bp, Homo sapiens
ttttaaaaaaataaattagtggttatataactgatacactgtgcgggttcagaaacaatctagtcttttgacatgaatattcatgtgaatgaaggaactcragtcctccatgttgtctcacatttgcattttggtgaaagagtcttgagtgttcttttggtgttatttgagttgcataaatgtggggaatggtaattactg

SEQ ID NO: 41705 - DNA, 201 bp, Homo sapiens
atattgaaaattcacagtaacagaaattaaatagtacagaataatataagtaacaagaaatctcagctcttaggggtgaccacttaactctacgtcttggrtatattttttatgctggttagattaagctctgctttattcttttaaatatgtcatatcccatcatatggttgtaacataatcaattgagattttagtttt

SEQ ID NO: 41706 - DNA, 201 bp, Homo sapiens
taaagtgagcgttttatattttctgcagatattttatgtaaacaatggcaatcttggaggtagaaaggaaaaaaaagatctggaggaaaatgaaaatgctrtaaatagactcagctgattttataaatctgtcaagggccatctttgtttatgtggtatcattataaattaaaattaacccacccacattttttgaaggct

SEQ ID NO: 41707 - DNA, 201 bp, Homo sapiens
tgcacttatcaaaagctccataaggatatctgagaatgtgggtgagccaattcagagatacagtagtcctttttcattcttttcttaataaagtcttctcvctagccatctgtaatttaaaagtcatcccccccccccacttttgttattgaatatgctacctagcattaagtaacctccttacctccaaaaaagctcctg

SEQ ID NO: 41708 - DNA, 201 bp, Homo sapiens
gcaggagaattgcttgaacctgggaggcagaggtttcagtgagctgagatcgtgccattgcactctggcctgggctacacggtgagactctgtctcaaagraaaaaaaaaaagaatagagttgagtgcctgtggcttttccaggttcaggatgcaaactgctagtggttctgtcattctcacttctggagggcagtggccc

SEQ ID NO: 41709 - DNA, 201 bp, Homo sapiens
tgcaatctcagctcactgcaacctccaccccctgggtccaagcgattctcgagcctcagcctcccaagtagctgggactacaggtgcacactaccacgccmggctaatttttgtatttttagtagagatggggtttcaccatgttgaccagactggtcttgaattcctgacctcaagtgatctgcctgcctcagcctccca

SEQ ID NO: 41710 - DNA, 201 bp, Homo sapiens
ggctggagtgcagtggtgcaatctcagctcactgcaacctccaccccctgggtccaagcgattctcgagcctcagcctcccaagtagctgggactacaggygcacactaccacgcctggctaatttttgtatttttagtagagatggggtttcaccatgttgaccagactggtcttgaattcctgacctcaagtgatctgc

SEQ ID NO: 41711 - DNA, 201 bp, Homo sapiens
acttgaggccaggagttcaagacccgcctagccaacatggtaaaaccccgtctctactaaaaatacaaaaaattagccgggcgtggtggcaggcacctgtrgtcccagctactcgggaggctgaggcaggagaatggcgtgaatccaggaggtggagcttgcagtgagccgagatcatgccactgcgctccagcctgggcg

SEQ ID NO: 41712 - DNA, 201 bp, Homo sapiens
atttaagtgtaatttaattttttttttgtagagataggggtcttactgtgttgcccaggctggtattgaactcctggtctcaagtgatcctcctgccttgscctcccaaaatgctgagattataggcatgagccactgcatctgacctgtaattttttttttttttttttgagacggagtctcactctgttgcccaggctg

SEQ ID NO: 41713 - DNA, 201 bp, Homo sapiens
atgcattttacagcaaacttttaaagattaagttacaattcttatataagacaattatattactaaggattgaggcttaaaaaatgattaaaatgggctgrgtgtggtggctcacgcttgtaatcccagcactttaggaggccaaggcgggtggatcacctgaggtcaggagttgagatcagcctggccaacatggtgaaa

SEQ ID NO: 41714 - DNA, 201 bp, Homo sapiens
agtgatctaaaatcatcctagcacagtataattgtaacagttctttttttttttttttaagacagagtctcactctgtcgcccaggctggagtgcagtggygtgatctcggctcactacaagccccgcctgccaggttcacgccattctcctgcctcagcctcctgagtagctggaactacaggcgtcagccaccacgccc

SEQ ID NO: 41715 - DNA, 201 bp, Homo sapiens
tttaaaggcaaacttgatagatctaccccaccccttcatactcccctccactggaatttaagatccctgagggcagggattttgccaattctgtttactcttctattctaactgattgttttcctattagctagaaggctccctgaggccagataccttgtctctttttgctcacctttatacccccaacacctggcagta

SEQ ID NO: 41716 - DNA, 201 bp, Homo sapiens
ttttaaaggcaaacttgatagatctaccccaccccttcatactcccctccactggaatttaagatccctgagggcagggattttgccaattctgtttactcttctattctaactgattgttttcctattagctagaaggctccctgaggccagataccttgtctctttttgctcacctttatacccccaacacctggcagt

SEQ ID NO: 41717 - DNA, 201 bp, Homo sapiens
acagtaagggcgcgccactgcccagctaatttttgtatttttagcagagacggggattcgccatgttggccaggctggtctcgaactcctgacctcaggtkatccactcgcctcggcctcccaaagtgctaggattacaggcttgagcccccgcgcctggcctgaaaattaacattcttaagatttagctgaaacttatct

SEQ ID NO: 41718 - DNA, 201 bp, Homo sapiens
tgggattatatgcacgagtcactgtgcataatgattttaaaatttcagagatctcaaaagatgttactgtaccctgggattagtcctgtttccccttagggaaaatatttccaattttataatgaaagttagaatacaagtcagtgacaacataatccacttacctgaaatgcattttacagcaaacttttaaagattaag

SEQ ID NO: 41719 - DNA, 201 bp, Homo sapiens
agccttgaactcctgggctcaggtgattcacctgtcttagcctctcaaatggttgggattacaggtatacaccaccatacccagctaaattttttttttttaatttttttgtagagacaagatctcgtcatgttgaccaggcttgtcttgaactcctggccccaagtgatcctcccacctcagtctcccaaagtgttggga

SEQ ID NO: 41720 - DNA, 201 bp, Homo sapiens
actgcaacctctgcctcccaggttcaagtgattctcctgcctcagcctcctgagtagctgggattacaggcacctgccaccacgcccagctaaattttttktgtgtgtgtgttttttagtagagacagggtttcaccatgttggccaggctggtctcaaactcctgacttaggtgatctgcccgccttggcttcccaaagt

SEQ ID NO: 41721 - DNA, 201 bp, Homo sapiens
ctgaaatttacttgttgcaaatttagtttttcacaaaagaacaagtgatagtccttgataatcctcagttagctagttagcttttttttttttttttttttgagaagacagggtcttgctttgtcacccaggctggagtgcagtggcatgatcgcagctcactgcagccttgatctcctaggctcaagtgatcctaccacc

SEQ ID NO: 41722 - DNA, 201 bp, Homo sapiens
tgtagtcctagctgcttgggaggccgaaatgggaagattgcttaagcccaggaggttgaggctgcagtgaaccgtgatcccgccagtgcattctaggctgkatgacagagtgagactttgtctcaaaaaaaaaaaaaaaaaaaaaaaagagatagggtttggctacattgttcagtctggtctccagctcatgacctcaag

SEQ ID NO: 41723 - DNA, 201 bp, Homo sapiens
ggcttgaacccgggaggcggagcttgcattgagcccagttagtgccgctgcactccagcctgggtgacagagcgagactccgtctcaaaaaaaaaaaaaawttttttttctgcctttttctaatttcccgaagagaaaaaaaggcattgaaagtgaaccagaatataagctaattattctcctaattacttctgttgccat

SEQ ID NO: 41724 - DNA, 201 bp, Homo sapiens
cactttgggaggccgaggcaggcggatcatgaggtcaggagattgagaccatcctggctaacatggtgaaaccccgtctctactaaaaaatacaaaaaaaattagccgggcgtgatggcgggcgcctgtagtcccagctactcaggcggctgaggcgggagaatggcttgaacccgggaggcggagcttgcattgagccca

SEQ ID NO: 41725 - DNA, 201 bp, Homo sapiens
tttgacttcctgggctcagatgatcctggcacctcagtctccccagtagctgggactacaggtatgcgccaccacacccagctaatttatatatatatatwtttttttgtggagacaaggtttcgctgtgttgcccaggctggtctcaaacttttgggctcaatctgtctgccccctgtggcctcccaaagtgctagaatt

SEQ ID NO: 41726 - DNA, 201 bp, Homo sapiens
aacatgtgtactgggttccaagtaattaacttccagagtttctatggcataacagttttctacattgggtgtgacttagaattgaggtagtcccagcagcrtggattttactcattatagttgtagctttacacacacacacacaaacacacacacacacacccctataaatattattttaaaataattgaaccatttttc

SEQ ID NO: 41727 - DNA, 201 bp, Homo sapiens
cttttgtggcctgtcctacaaacttctccacatttataacattaacaacatgtgtactgggttccaagtaattaacttccagagtttctatggcataacarttttctacattgggtgtgacttagaattgaggtagtcccagcagcgtggattttactcattatagttgtagctttacacacacacacacaaacacacaca

SEQ ID NO: 41728 - DNA, 201 bp, Homo sapiens
actaatgccatatgactaccatccttctgggaaccttagaaaaacaaggtggatctctcatgaggtcttttcacagagaaaactattctgttactgtaaayaacccagggactgaaatgcataatgtataatgtgccatgttagaggaggccagttaaagataccctcaggacaggaaagacaaagtgtttctggtttttc

SEQ ID NO: 41729 - DNA, 201 bp, Homo sapiens
aataataggtgctttttttcttttaggacatggttcttggagaatatgttcatattcattttcttcatgagattgctctttttggaattcttctgtgattsctctgattgggatttttaggatttttgatgttagggattttaatctaggaattttgatcttttgggatttcaacatttgggattatggcttttgggatta

SEQ ID NO: 41730 - DNA, 201 bp, Homo sapiens
actgggactgaattggttggtatccaggttgcaagacaaagtcccctttacccttccctcttcgcctctcaaacggagggaaggagtctttaatagagctktgagttgcactcctggccgcccagctggtgttctcactaggtcacatgctccccaaacccggtggctctgagcctatcatagcaccaggacttgcccaga

SEQ ID NO: 41731 - DNA, 201 bp, Homo sapiens
tagcctttcacagaatacacaatttacaggtgagaggagggtagaggaattaatcttatgccctagtctggcttagtgaaacaatatggcagaagaagcartgagatatgcgtttgtctcacatgagcctcagcgagatgactgagttctggctgtccttcatccacaaggaatttccatgtgggcaaattgtgagggagg

SEQ ID NO: 41732 - DNA, 201 bp, Homo sapiens
aaatcataggtagataagagacaaactattgcattcttttgagtctctgattagcctttcacagaatacacaatttacaggtgagaggagggtagaggaawtaatcttatgccctagtctggcttagtgaaacaatatggcagaagaagcaatgagatatgcgtttgtctcacatgagcctcagcgagatgactgagttct

SEQ ID NO: 41733 - DNA, 201 bp, Homo sapiens
agacagctggggattgtgaacccagaatatctaagacaggtctcaaccaatttagaaagtttattttgaaaccaatttagaaaggttaaggatgcacctgygactcagccacaggaggttctgaggacatgtacccaaggtggtcagggcacaacttggttttatatgttttaggtagacatgagacatcaattaatttct

SEQ ID NO: 41734 - DNA, 201 bp, Homo sapiens
gaggcggacggatcatgaggtcaggagatcgagaccatcatggccaacatggtgaaaccctgtctctactaaaaatacaaaactagctgggtgtggtggcrtgcacctgtaattccagctgcttgggaggctgaggcaggagaatcgcttgaacctgggaggcggagattgcagtgagccaagattgtgccactgcactcc

SEQ ID NO: 41735 - DNA, 201 bp, Homo sapiens
gggaggctgaggcaggagaatcgcttgaacctgggaggcggagattgcagtgagccaagattgtgccactgcactccagcctggtgacagagtgagactcyatctcaaaaaaaaaaaaaaaaatgaaaaaagaaaactaaagttggagcaaaaagaaaatggccgggcacggtgggtcacgcctgtaatcccagcactttg

SEQ ID NO: 41736 - DNA, 201 bp, Homo sapiens
ggatcacaaggtcaggagattgagaccatcctggctaacatggtgaaaccttgtctctactaaaaatacaaaaaaaaaaaattagccaggcgtgatggggkgcacctgtagccccagctacttgggaggctgaggcaggagaatggagtgaaccgggggggcggagcttgcagtgagccgagatcgcgccactgcactcca

SEQ ID NO: 41737 - DNA, 201 bp, Homo sapiens
tacaagttcaattcctcagtacactagccacacttcaggtgcccagtgtccacactgactagtggtgactgcgttggacagtgcagatacagaacatttcygtcatcacagaaagttcctttggacagagccatgttaagtgatgttatcacaagatggacagaaacattcctgtttgatttatttttcagacccagtttg

SEQ ID NO: 41738 - DNA, 201 bp, Homo sapiens
aatgtatatattatagatagattctgcttcaataagcaattttaagttacttttccagcttggattcctatccggtaacttctaagtaagaattgttttckatgtatgtcatatgttctgaaatataatttcaatcaattacacatatgattcttgatgcaaagagatggtttcaaattacctaaaattgtaaaataatat

SEQ ID NO: 41739 - DNA, 201 bp, Homo sapiens
acggggtttcaccatcttggccaggcaggtcttgaaatcctgacctcttgatccatccgcctcggtctcccaaagtgctgggattacaggcgtgagccacygcgcctggccaaatattctttacatcttacctggcataaagtgatgtggtggagggatgcttaaatcctgatttacaagtattagtgagaaatgaggagc

SEQ ID NO: 41740 - DNA, 201 bp, Homo sapiens
aggagactttgacttttttcaactgatgttaagaatgaaaaaagatatcttgattttatgtcataaggatgtgtttgaatacttgtgaagcagaagcattwggcatgaacagtttaaaattgttactatttatttgtgaacgttttaaaattgtttaacttgaacaatttaaaattggttacttctgagctacactaatcc

SEQ ID NO: 41741 - DNA, 201 bp, Homo sapiens
taaattataaatgaagaacagatgtaattatgcagatgtcatgacatttttaattgtgagatttattttttccctcatagtaatataatagctgtatatakagatattttttgagatggaatcttgctgtgtggcccagactggagtgcagtgggtcaatgtcggctcactgcaagctccgcctcccgagttcatgccatt

SEQ ID NO: 41742 - DNA, 201 bp, Homo sapiens
gcagtgagccaggattgtgccaccgcactccagcctgggtgagagagtgagattccgtctcaaaaaaaaaaaaaaaaaagtagataaagggggcagagttyagcaagaggcaagggaggaggtggggattttatgtggcatgggcagatgtgtttgttagttgggacttacatgtgaacttttgaaaaagatacattattt

SEQ ID NO: 41743 - DNA, 201 bp, Homo sapiens
tagtagagatgtttcaccatgttggccaggctggttttgaactcctgacctcgagtgatccgcctgcctcggcctcccaatgtgtttggattacaggcgtragccacttgcgcctggccagaaatagtatctcatttttcggaccatgtcaaaagaatgataacatctcattttagtatatattttttggattactgatta

SEQ ID NO: 41744 - DNA, 201 bp, Homo sapiens
cactgcaacctccgcctcgtgggttcaagcaattctcttgcctctgcctcctgagtagctaggattacaggtgtgtgccatcacccctggcttatttttaratttttagtagagatgtttcaccatgttggccaggctggttttgaactcctgacctcgagtgatccgcctgcctcggcctcccaatgtgtttggattaca

SEQ ID NO: 41745 - DNA, 201 bp, Homo sapiens
aatcctcataacaggtttcatgtacatattattcactgtatgtcatagcttttcatggtaattcgtattgagtaatcaaacctgtggttgttcactcttcraatgctgaattataccgtattataatttagttaattaccttttattgttaaatatttatttccaagtttttttctttgttttgtttttcacctgcccctc

SEQ ID NO: 41746 - DNA, 201 bp, Homo sapiens
acgccgaggtggtcagattacctgaggtcaggagtttgagaacagcctggccaacatggtgaaacccagtctccattaaaaatgcaaaaattagccaggcrtggtggcaagtgcctgtggtcccaactacttgggaggctgaggcaggagaattgcttgaacccaggaggtggaagttgtagtgagccaagattgtgccac

SEQ ID NO: 41747 - DNA, 201 bp, Homo sapiens
aatttcacaaaagagttttcctccaagtgtaaataattcattttattttattttattttattttattttattttattttattttattttattttattttatgagatggagtcttgctctatcacccaggctggagtgcagtggtgtgatctcggctcactgcaacctccgcttcctgggctcatgtgattctcctgcctca

SEQ ID NO: 41748 - DNA, 201 bp, Homo sapiens
gtaaaatgatgtattagtcttttatttgtaatatttatttgaagttagttaattcatttattaccttattacttgcctcattctataaaaggatttgaagkggcatacaaaaatgtgtaaagactataaaacaagaagtaagtagttgagagaagctcttttattctgattattttagttatttgagtttcttgataatgt

SEQ ID NO: 41749 - DNA, 201 bp, Homo sapiens
aaatttcacaaaagagttttcctccaagtgtaaataattcattttattttattttattttattttattttattttattttattttattttattttattttatgagatggagtcttgctctatcacccaggctggagtgcagtggtgtgatctcggctcactgcaacctccgcttcctgggctcatgtgattctcctgcctc

SEQ ID NO: 41750 - DNA, 201 bp, Homo sapiens
agtgttttagaaaaagtcatcctttttgatggaaacataattctattataagaatatttgtatgttttcaaataaaaatacaaataaagcatgagttgcckgaggctttttactcttaagccttatggtccttggctgttctttgatagttgactttcttccctcttttctcagctgctaagagtttattttgatgcttct

SEQ ID NO: 41751 - DNA, 201 bp, Homo sapiens
aaaatttcacaaaagagttttcctccaagtgtaaataattcattttattttattttattttattttattttattttattttattttattttattttattttatgagatggagtcttgctctatcacccaggctggagtgcagtggtgtgatctcggctcactgcaacctccgcttcctgggctcatgtgattctcctgcct

SEQ ID NO: 41752 - DNA, 201 bp, Homo sapiens
aaaaatttcacaaaagagttttcctccaagtgtaaataattcattttattttattttattttattttattttattttattttattttattttattttattttatgagatggagtcttgctctatcacccaggctggagtgcagtggtgtgatctcggctcactgcaacctccgcttcctgggctcatgtgattctcctgcc

SEQ ID NO: 41753 - DNA, 201 bp, Homo sapiens
aaaaaatttcacaaaagagttttcctccaagtgtaaataattcattttattttattttattttattttattttattttattttattttattttattttattttatgagatggagtcttgctctatcacccaggctggagtgcagtggtgtgatctcggctcactgcaacctccgcttcctgggctcatgtgattctcctgc

SEQ ID NO: 41754 - DNA, 201 bp, Homo sapiens
ggagctggatcagtttgtagcatcctcacagacatttgtgctggctgcagtatttttatttttttgtgtcatcttcctcaattcattctttttttttttttgagatggagtcttgctctgtcgcccaggctggagtgcagtggcacaatcttggctcactgccacctctgcctcccaggttcaagtgattctcatgcctca

SEQ ID NO: 41755 - DNA, 201 bp, Homo sapiens
gcatgatctcggctcactgcaacctccaccgtccgagatcaagcgattctcctgccttagcctcctgagtagctgggattacaggcacctgccacgcctggttaattcttgtattttcttagtagagacggggtttcaccatcttggccaggctggtcttgaactcctgacctcatgatccacccaccttggcctcccaaa

SEQ ID NO: 41756 - DNA, 201 bp, Homo sapiens
actcctggtctcaagtgatcctcctgccttggcctcccaaaatgctgagattataggcatgagccactgcatctgacctgtaattttttttttttttttttgagacggagtctcactctgttgcccaggctggagtgcagtggcatgatctcggctcactgcaacctccaccgtccgagatcaagcgattctcctgcctta

SEQ ID NO: 41757 - DNA, 201 bp, Homo sapiens
tatatatatatatacacatatatatacacaccatatatagtgtgtatatatgtgtatatatgtatacacacatatatagtgtgtatatatgtatacacacatatatagtgtgtatatatgtatacacacatatatagtgtgtatatatgtgtatatatgtatacacacatatatagtgtgtatatatatgtatacgcaata

SEQ ID NO: 41758 - DNA, 201 bp, Homo sapiens
gcaaggaatactttattcaaggactcttgtggtaggggtggtattagtctgctagaagtgtagactgctcaggctgccgtaataaaataccacaaacgttwgtattctgacacagaaatttagttttttcacagttttgtaacctggatatctgacgtcagtgtgtcaccgtggttgggttctgataagagcacttttcct

SEQ ID NO: 41759 - DNA, 201 bp, Homo sapiens
atatatatatatatacacatatatatacacaccatatatagtgtgtatatatgtgtatatatgtatacacacatatatagtgtgtatatatgtatacacacatatatagtgtgtatatatgtatacacacatatatagtgtgtatatatgtgtatatatgtatacacacatatatagtgtgtatatatatgtatacgcaat

SEQ ID NO: 41760 - DNA, 201 bp, Homo sapiens
ttttctcactaatctctctggaaatatgtagcacattttatttatttctggtgttctgaaatttgacagtggtgtctctgtgtgtctgttttctagtacaytgttgaggactccatggaaattttgactagactctagaaaatcatgtcttttggttctggtatattttctttggatatttcaaagccttcttcctctctc

SEQ ID NO: 41761 - DNA, 201 bp, Homo sapiens
gggttagggtctcctgacagagctggtctcagcacagataaaaaactgaactgggccacagtcatttgggcagtgactgtctttgatgacagtgctcagcrtggctgtctcttggatcatattgttccaatctggactgggagtttgcctctgtatagagttctaggttagaattaattttcctccagaattttaaaaaca

SEQ ID NO: 41762 - DNA, 201 bp, Homo sapiens
ctgggttagggtctcctgacagagctggtctcagcacagataaaaaactgaactgggccacagtcatttgggcagtgactgtctttgatgacagtgctcarcgtggctgtctcttggatcatattgttccaatctggactgggagtttgcctctgtatagagttctaggttagaattaattttcctccagaattttaaaaa

SEQ ID NO: 41763 - DNA, 201 bp, Homo sapiens
caagtgattctcgtgcctcagcctcccaagtagctgggattacaggtgcagctagaatgcctggctaatttttgtatttttaggagcaatggggtttcacygtgttagccaggctggtctcgaactcctgcctcggcctcccaaagtgttgggattacaggtgcgagccacagtgcccggccttaacctaactatatttct

SEQ ID NO: 41764 - DNA, 201 bp, Homo sapiens
tagttccagctacttgaggcaggagaattgcttgaacccaggaggcagaggttgcagtgagccaagattgtgccactgcactcctgcctcagcgacagagwgagactacgtctaaaaataaataaataaatgataaaagtaatataatactataaaaaatttggaggccagatgtgatggctcacacctgtaatcccagca

SEQ ID NO: 41765 - DNA, 201 bp, Homo sapiens
tggctcacacctgtaatcccagcactttgggaggcccaggcgcagggatcacctgagctcaggagttagagaccaacctgatcaacatggccaaaacctgyctccaccaaaaatacaaaaaattatttgggcatggtggtatgagcctgaggtcccaaggaagctgaggttagaggattgcttgagcctaggagatggagg

SEQ ID NO: 41766 - DNA, 201 bp, Homo sapiens
cggctagatttgttgaatagtatattctaggcattaacaaagtaaaacagttatgaacagttgttaaataatattgaaaatatatattttaattatacttytagatcttttaattaatttatgtagtatgacttttatgtaaccatattgtattatcgtttttcttgtagggaacaaatggccaaagaaatgtcagaattt

SEQ ID NO: 41767 - DNA, 201 bp, Homo sapiens
ggttctagttattgaggagtgtagaaaaaaaatgttaaaatttgtgaagttatgagtttaatgaatgacaaactatagtatgtagaacaaaaaatgtataygagagaattaatttcttatatatttctacagagtattattgttatatttataataaaactctacatttgcctttcactatatgtactttaaatatttaaa

SEQ ID NO: 41768 - DNA, 201 bp, Homo sapiens
agataggaattgcagtagagagacagtaattaatgtagagtcggctgtacgggacactggagttttatgattactcaaatcagtctctctgaaaactcggrgatctgaatttttaaggataatttggtaggggcttgggttggagatgaaatcatagggggtcaaaattgagtttttcttgcttgcttctgttcctgtgtg

SEQ ID NO: 41769 - DNA, 201 bp, Homo sapiens
atttcatgttgaagctgcactgtacagtatgatagcttctagtcacgtggttattaattatttcacgtggttatttaaattaagtaaaattacaagttcarttcctcagtacactagccacacttcaggtgcccagtgtccacactgactagtggtgactgcgttggacagtgcagatacagaacatttctgtcatcacag

SEQ ID NO: 41770 - DNA, 201 bp, Homo sapiens
gtggcatgatttcagaggaataccctcctgtccaaattcttattgtcatcagcagatacttcatcagttaggaatttatttggtttaataaacacacatcyctgaaaaggtaggtggtgagtgtggaaggagtaaagataggagagcaagtagtaattcccatgtctgtgtaggcttatatgattagcgttcacaggggaa

SEQ ID NO: 41771 - DNA, 201 bp, Homo sapiens
agcaaggtatgcttagcctgattctttgctaagcaaattcaaaattgttcttgttataaagaaaaactctggaagaagtttgtagagtaccaccctacagyctacagttacttggttccttagagatatctctgcggcccaagggaaagcccataaatgtgcaggtgggtggttctcaggcattgcttcctccattttccc

SEQ ID NO: 41772 - DNA, 201 bp, Homo sapiens
catacttgcttttttttttatcccctttttttgttagcacatcaatcttaactataccagttaagttagtggtggtgttcactgttttaagaatcaagtgrtagcagacttagctttaagcattgattgctacattggagtttcctaggttatacttggaagtcactttgtgaaaaggtcatacatcaggaccagggccat

SEQ ID NO: 41773 - DNA, 201 bp, Homo sapiens
tgcttgatgaattatgtaaatgaatgttcattcatagtccaaagcaaatagttttttgagatgttaaatataacaggtaatataaatgcttttttacatartaaaatgtaatgaacttatttttacataataaaatggtatatatttttctaggtgaatgtaatttaacagcatgatagttaacatttttgtaccaaatag

SEQ ID NO: 41774 - DNA, 201 bp, Homo sapiens
ttgaaatacccagtcagttattaaattacttaattccttgtttatgaattcactaattatttgctattatctggtgccctgcttttggtgcttttttcccrcatcatattagattattgcctaccattctgttctaccagagacctttctaatatggtcagtgacctttctaatatgcatatctaattaggtgaccctcag

SEQ ID NO: 41775 - DNA, 201 bp, Homo sapiens
tatttttaacacttgattgaatttctccaaattttatataaaataatgagtatccaattatgatcagtagtaaataaaaagtggaatgtttgacttaacaytcaactctgcagctgaaccattgtggagaaactaaggttcggaatgacagccacacaagttagagaagattttaggaaactggaattgattaccttgaaa

SEQ ID NO: 41776 - DNA, 201 bp, Homo sapiens
gacgaataaattaacatgtcaattttttttttttgctcaatgtaatcaatagatattgagctcctggcagcttgcagagaagaatttcataggagactaamagtgtatcatgcttggaaatctaagaacaagaagagaaatactgaaacagagcaacgtgctccaaagtctgttactgattatggtaaagagaaatctgta

SEQ ID NO: 41777 - DNA, 201 bp, Homo sapiens
tcatacactatcccccacccccgtcgcacagtttaaagccttctcattcgcatagataattttgtaagtctgaatagcctaatttagataaactttcttcrtagttcaattagaaaactctccattttgagtgcttggttaggttttaatataaaggaaacattttacattaggaatcattgttttactaaccttactgac

SEQ ID NO: 41778 - DNA, 201 bp, Homo sapiens
gttctgtgagtataaaacagattaaacaggctaaccaaaattatgctgctaaagatgtaaagtcattgccccagggaaatgtttacatttgcagataaaakaaaaacctaattgttaagtaatgaaaattgagctaggaatgaaagattgatatgaatgaaatgcccagtactagtagaaaagcaaggatttttcttttct

SEQ ID NO: 41779 - DNA, 201 bp, Homo sapiens
ctgagatgaagtttctgtaacctctttttgtctcctgtttgtcacaaagattcttcatgtcttacctaaattgctttgtttacattctatgttcggagatrtaggtaggccatttgatcattgatgtgagtatacacactcatacactatcccccacccccgtcgcacagtttaaagccttctcattcgcatagataattt

SEQ ID NO: 41780 - DNA, 201 bp, Homo sapiens
gaggcatccagtaccttcagaatgcgattgagagcagacaggctcggcccacctatgcaacagccatgctgcagagtctgttaaagtagatgttgcacacyagccttacagctgggagcctttgccatggtacttaggtagggtgtgtgcccccagatttaaccattccataatcatgttagagttacttctataaagtga

SEQ ID NO: 41781 - DNA, 201 bp, Homo sapiens
atctcaggtctcaggactcttttacacacttaaaaattactgaagactgcgtattttgtttatgtggattatatctattgatattcactgtattagaaatktaaaaatgatttgatccaggccaggcactttgagaggctgaggcaggcagatcacttgaggccaggagttcaagacccgcctagccaacatggtaaaacc

SEQ ID NO: 41782 - DNA, 201 bp, Homo sapiens
gacctcatgatccacccaccttggcctcccaaagtgctgggattacaggcgtgagccactgtgcccggcataatttttttattattctgggaaagcttccyatttaaagggtcccagtgataatttcttttgtaaagagaagaatctttgtataaaacaaatgattgtttcctagattatattaataaaatacggattttt

SEQ ID NO: 41783 - DNA, 201 bp, Homo sapiens
ttgccatggtacttaggtagggtgtgtgcccccagatttaaccattccataatcatgttagagttacttctataaagtgaacagattttattaatcacggyttttggtgaatttgtttaaggttaattatggtagcaaattttggacctaaacattatttttctgtatcccgctgtaattcccaaaactctcattattctc

SEQ ID NO: 41784 - DNA, 201 bp, Homo sapiens
tatatatatatatatacacatatatatacacaccatatatagtgtgtatatatgtgtatatatgtatacacacatatatagtgtgtatatatgtatacacacatatatagtgtgtatatatgtatacacacatatatagtgtgtatatatgtgtatatatgtatacacacatatatagtgtgtatatatatgtatacgcaa

SEQ ID NO: 41785 - DNA, 201 bp, Homo sapiens
gcatattctgatgtttctcatcctttgccagaagactaccttacatccatcgtaattgttctctaggaaaagagaacttttttcaaaattcaaaatacttyttaaggatggcacagtaccatataactggagtaataaaacatgagcttacattcttacaataactaaaccacttaaaatgatcaaggcactaatgttttg

SEQ ID NO: 41786 - DNA, 201 bp, Homo sapiens
atatatatatatatatacacatatatatacacaccatatatagtgtgtatatatgtgtatatatgtatacacacatatatagtgtgtatatatgtatacacacatatatagtgtgtatatatgtatacacacatatatagtgtgtatatatgtgtatatatgtatacacacatatatagtgtgtatatatatgtatacgca

SEQ ID NO: 41787 - DNA, 201 bp, Homo sapiens
tcaaatattctttcaacttcatctcaatagtgatttttgtatcagaatcttgtccaagttgtttcattgatttagtaagtgttctgcttccaacatctttmtttttaagaaattcctagtgtcttttttggcctttgaggttttggtaattgtagacctgtttcataagctttgtaattcagaaatccttgtatttagtaa

SEQ ID NO: 41788 - DNA, 201 bp, Homo sapiens
gttgtgtgtgttatatatatatatatatatacacatatatatacacaccatatatagtgtgtatatatgtgtatatatgtatacacacatatatagtgtgtatatatgtatacacacatatatagtgtgtatatatgtatacacacatatatagtgtgtatatatgtgtatatatgtatacacacatatatagtgtgtata

SEQ ID NO: 41789 - DNA, 201 bp, Homo sapiens
tgttgtgtgtgttatatatatatatatatatacacatatatatacacaccatatatagtgtgtatatatgtgtatatatgtatacacacatatatagtgtgtatatatgtatacacacatatatagtgtgtatatatgtatacacacatatatagtgtgtatatatgtgtatatatgtatacacacatatatagtgtgtat

SEQ ID NO: 41790 - DNA, 201 bp, Homo sapiens
gtgttgtgtgtgttatatatatatatatatatacacatatatatacacaccatatatagtgtgtatatatgtgtatatatgtatacacacatatatagtgtgtatatatgtatacacacatatatagtgtgtatatatgtatacacacatatatagtgtgtatatatgtgtatatatgtatacacacatatatagtgtgta

SEQ ID NO: 41791 - DNA, 201 bp, Homo sapiens
tgtgttgtgtgtgttatatatatatatatatatacacatatatatacacaccatatatagtgtgtatatatgtgtatatatgtatacacacatatatagtgtgtatatatgtatacacacatatatagtgtgtatatatgtatacacacatatatagtgtgtatatatgtgtatatatgtatacacacatatatagtgtgt

SEQ ID NO: 41792 - DNA, 201 bp, Homo sapiens
atgtgtgttgtgtgtgttatatatatatatatatatacacatatatatacacaccatatatagtgtgtatatatgtgtatatatgtatacacacatatatagtgtgtatatatgtatacacacatatatagtgtgtatatatgtatacacacatatatagtgtgtatatatgtgtatatatgtatacacacatatatagtg

SEQ ID NO: 41793 - DNA, 201 bp, Homo sapiens
tatgtgtgttgtgtgtgttatatatatatatatatatacacatatatatacacaccatatatagtgtgtatatatgtgtatatatgtatacacacatatatagtgtgtatatatgtatacacacatatatagtgtgtatatatgtatacacacatatatagtgtgtatatatgtgtatatatgtatacacacatatatagt

SEQ ID NO: 41794 - DNA, 201 bp, Homo sapiens
ttatgtgtgttgtgtgtgttatatatatatatatatatacacatatatatacacaccatatatagtgtgtatatatgtgtatatatgtatacacacatatatagtgtgtatatatgtatacacacatatatagtgtgtatatatgtatacacacatatatagtgtgtatatatgtgtatatatgtatacacacatatatag

SEQ ID NO: 41795 - DNA, 201 bp, Homo sapiens
ggctggcgcacggtgcgcgcacccactgacctgcgcccactgtctggcactccctagtgagatgaacctggtacctcagatggaaatgcagaaatcacccrtcttctgcgtcgctcacgctgggagctgtacatcagagctgttcctattcggccatcttggctcgtgcctccacattattctttagctagtcttatatgt

SEQ ID NO: 41796 - DNA, 201 bp, Homo sapiens
aagagtacttatgtgtgttgtgtgtgttatatatatatatatatatacacatatatatacacaccatatatagtgtgtatatatgtgtatatatgtatacacacatatatagtgtgtatatatgtatacacacatatatagtgtgtatatatgtatacacacatatatagtgtgtatatatgtgtatatatgtatacacac

SEQ ID NO: 41797 - DNA, 201 bp, Homo sapiens
ctatgagaattaataggtatttcaggcatacaactggtaagaaatggtcctgaagagagagatggtaattttctgatatctcatgaatacaggtaaggacracatggagatgtgtgagctgaatcttgaggagactggcctgactcggaagcgtggtgctgagatcttgccaagacagtttgaagaaatctgggaacgctg

SEQ ID NO: 41798 - DNA, 201 bp, Homo sapiens
gccgtctgtcacccctttctttgactaggaaagggaactccctgaccccttgctcttctggagtgaggcaatgcctcgccctgctttggctggcgcacggkgcgcgcacccactgacctgcgcccactgtctggcactccctagtgagatgaacctggtacctcagatggaaatgcagaaatcacccatcttctgcgtcgc

SEQ ID NO: 41799 - DNA, 201 bp, Homo sapiens
agatctccagctgcgtcctgggagaaccactgctctcttcaaggctgtcagacagggacatttaagtctgcagaggttactgctgtctttttgtttgtctrtgccctgcccccagaggtggagcctacagaggcaggcaggccttcttgagctgtgatgcttcccagttggagcttcccggctgctttgtttacctaagca

SEQ ID NO: 41800 - DNA, 201 bp, Homo sapiens
ggcacagtaccatataactggagtaataaaacatgagcttacattcttacaataactaaaccacttaaaatgatcaaggcactaatgttttggtctgaaargctgtgtactttatagacattttcagacatttttggaaatttccattaaaggtggaaaatctatttttttcctcctttgcagtgtcttagtttgaatgaa

SEQ ID NO: 41801 - DNA, 201 bp, Homo sapiens
gagtatctttgtggcgttctctgtatttcctgaatctgaatgttggcctgccttgctagattggggaagttctcctggataatatcctgcagagtgttttycaacttggttccattctccccgtcactttcaggtacaccagtcagacatagatttggtcttttcacatagtcccatatttcttggaggctttgttcgttt

SEQ ID NO: 41802 - DNA, 201 bp, Homo sapiens
tgtagatttccgcagtctctccaggtgatcgcactgtgcagcctcattgctcataaacaaaactttaatatgcttttaatgatctttcaagtgtgttgagratttctttcttgattttgaggaatatatgtcagtatatttttcaactttaagtgttcgtatatatattagtaaaaacattgaaactgaagtctgggggaa

SEQ ID NO: 41803 - DNA, 201 bp, Homo sapiens
ttattacttatgagggtgtgttttttgtgtgcttatagaacttttctaagtgttcttatagcagtgaagcctacaaagtaagagtttccagattccatccrttcttttagctgacttgaatgactctaatgcagtgggttgcaggtttggctacttacctatgtactctgtaaacatccagaggcccagggatattctgag

SEQ ID NO: 41804 - DNA, 201 bp, Homo sapiens
actgataattttaaaatgttttctttgtgtgctgttagtattgattcaaatgtcagcagctttaagcctaatatttatgactttcacatttggaatttaargacaaaaatacatcaaggagttatgctgacataattctaaggagttttgttgtattttagaataaaattataaagtaaaatgattctctgtactgctttt

SEQ ID NO: 41805 - DNA, 201 bp, Homo sapiens
aaagagtacttatgtgtgttgtgtgtgttatatatatatatatatatacacatatatatacacaccatatatagtgtgtatatatgtgtatatatgtatacacacatatatagtgtgtatatatgtatacacacatatatagtgtgtatatatgtatacacacatatatagtgtgtatatatgtgtatatatgtatacaca

SEQ ID NO: 41806 - DNA, 201 bp, Homo sapiens
ggaatttgggtctctgctagtactaagcaggtagtagatactaatgtggaaagagtacttatgtgtgttgtgtgtgttatatatatatatatatatacacmtatatatacacaccatatatagtgtgtatatatgtgtatatatgtatacacacatatatagtgtgtatatatgtatacacacatatatagtgtgtatata

SEQ ID NO: 41807 - DNA, 201 bp, Homo sapiens
atcttttccccctattttctattgttacaggaaaggggtcctgatccagaccccaagagagagggttcttggatctcacacaagaaagaatttcagacgartccataaagtgaaaggaagtttatttagaaagtaaaggaataaagaatagctcctccacagacagagcagccccaaaggctgctggctgcccatttttat

SEQ ID NO: 41808 - DNA, 201 bp, Homo sapiens
tgctggaatttgggtctctgctagtactaagcaggtagtagatactaatgtggaaagagtacttatgtgtgttgtgtgtgttatatatatatatatatatacacatatatatacacaccatatatagtgtgtatatatgtgtatatatgtatacacacatatatagtgtgtatatatgtatacacacatatatagtgtgta

SEQ ID NO: 41809 - DNA, 201 bp, Homo sapiens
gtgctggaatttgggtctctgctagtactaagcaggtagtagatactaatgtggaaagagtacttatgtgtgttgtgtgtgttatatatatatatatatayacacatatatatacacaccatatatagtgtgtatatatgtgtatatatgtatacacacatatatagtgtgtatatatgtatacacacatatatagtgtgt

SEQ ID NO: 41810 - DNA, 201 bp, Homo sapiens
tctgagtgtctgctatttgcaagtgtaatcttttgctgaaaaataagtttattattacagaaaagaaattgttcccatattttctgattaatgatctcaarttatatgcataaaagtcttaaaggccaggtgtggtggctcacgcctgtaatcccagcactttgggaggctgaggtgggcagatcacttgagctcaggagt

SEQ ID NO: 41811 - DNA, 201 bp, Homo sapiens
gctcaagcttatttggtggtgctggaatttgggtctctgctagtactaagcaggtagtagatactaatgtggaaagagtacttatgtgtgttgtgtgtgttatatatatatatatatatacacatatatatacacaccatatatagtgtgtatatatgtgtatatatgtatacacacatatatagtgtgtatatatgtata

SEQ ID NO: 41812 - DNA, 201 bp, Homo sapiens
tcacgaccatgcctggctaatttttgtatttgtagtagaggtggggtttcaccatgttggccaggctggtctcgaacttctgacttcaggtgatctgcccrccttcgcctcccaaactgctgagattacaggcatgagccactgtgcctggccaatagcagctattgtttattgagcttttactaccatgtcagatattat

SEQ ID NO: 41813 - DNA, 201 bp, Homo sapiens
atgttgtgttgggcattcacatgccatgaaattgtgaacaatcctttgtgaagttctgaacagagccaagtacaatattctctcaattacacagtatttgygtaagccctagacaaattctgtgaatattaaaggcatgcaaaaaatacgttgtttacatgtataactttgtttacatgtaaaatatgtgtttgtatgtgt

SEQ ID NO: 41814 - DNA, 201 bp, Homo sapiens
aggaagtactgcagttgacagagttgattttattatggcagaagtcaatttctaagggacttgttaatggagtcattgttggtactcatcatcaagctttrtatttatgcacttgaaatgttaagctgtatccagtgccattccatatactgtatacaagatactgtctcatatgtggaccccttcccatcttcagaaagg

SEQ ID NO: 41815 - DNA, 201 bp, Homo sapiens
atattaggtagacacctaatttctaaatacctgtcatcaaacactggcattgaaataagtgactgtgttatataatgcagtgtaatgtatttgtagttgakatttttctaatgcaaaaaaatttaatgtattaaatatcctgtcagttgaaatgagaactctactctgcaatgcctcagaataaatgagtttccctttaca

SEQ ID NO: 41816 - DNA, 201 bp, Homo sapiens
ttgaactggatttaaacaaaaatttttctgtgtgttacggctagatttgttgaatagtatattctaggcattaacaaagtaaaacagttatgaacagttgwtaaataatattgaaaatatatattttaattatacttttagatcttttaattaatttatgtagtatgacttttatgtaaccatattgtattatcgtttttc

SEQ ID NO: 41817 - DNA, 201 bp, Homo sapiens
tctttcattagtccattttgatattctttttcttaaaagcatgctttgatttggaatttttagagctttgaatacatcagattctttttaaaactctgacrctgtcaaatacatcagcttgtggttttcaccattgtgccttatctaagtaatatttactaagcaactctggtgcaaaaatcctcatatggaatctatatc

SEQ ID NO: 41818 - DNA, 201 bp, Homo sapiens
tattctaacacttgttaaaacagcaaggaatactttattcaaggactcttgtggtaggggtggtattagtctgctagaagtgtagactgctcaggctgccrtaataaaataccacaaacgtttgtattctgacacagaaatttagttttttcacagttttgtaacctggatatctgacgtcagtgtgtcaccgtggttggg

SEQ ID NO: 41819 - DNA, 201 bp, Homo sapiens
tttgagtaagactataaaacccccatatgtagaatggtggcagcatagactagtgggagtaatggggagccatggactgtaactgtagagttaggcaagcytaaattctgattctatgttgttaggaggctgtctgctcgtgggcatttcgtctctcttctgaaattctcatctgtagaatggaagtaatgtgtatgttgt

SEQ ID NO: 41820 - DNA, 201 bp, Homo sapiens
atgcaaagagatggtttcaaattacctaaaattgtaaaataatatccagattctattaaaaacaaacctcacaatatatgaattttctaatctagatgtartgtatttgctctttaattttcactgcatgccttattttccaatcatttttaatgaatacttaaaaatgtattaaaattctgagtgatctcatgttgatta

SEQ ID NO: 41821 - DNA, 201 bp, Homo sapiens
cctttactgttagtgttttagaaaaagtcatcctttttgatggaaacataattctattataagaatatttgtatgttttcaaataaaaatacaaataaagyatgagttgcctgaggctttttactcttaagccttatggtccttggctgttctttgatagttgactttcttccctcttttctcagctgctaagagtttatt

SEQ ID NO: 41822 - DNA, 201 bp, Homo sapiens
aggatctgatttagtagacaaaaccagatatgtaaaattatcataataacactggcagtgtgtggtaagaaccataaagaaattgcaaagatagtagttgyagtggtggtggtgagaatgggtaagtgtcatttgtagggtaacctttgtactgaccttaaagagtaggtaggtttttgacacctagaaatgtagaggata

SEQ ID NO: 41823 - DNA, 201 bp, Homo sapiens
gtgttgaaagatggaaaacccgagatgaataaacagatcaagaatctggaaatttctattgatactttgatggccaaaattaaggtatgtaatttcaaccygaatgactttgactttttatgtaatttaatatattttgttattggtattgaaattgtatagaaaacgtccttagtttttcaaaattacaaaatgtgttga

SEQ ID NO: 41824 - DNA, 201 bp, Homo sapiens
ttgaaagatggaaaacccgagatgaataaacagatcaagaatctggaaatttctattgatactttgatggccaaaattaaggtatgtaatttcaacccgamtgactttgactttttatgtaatttaatatattttgttattggtattgaaattgtatagaaaacgtccttagtttttcaaaattacaaaatgtgttgagac

SEQ ID NO: 41825 - DNA, 201 bp, Homo sapiens
aagcataaccaaaactttaaattcctgacatctgctctctaggtgttagtgttaatgggatgcctaagatactcatgtgatgtttgggacactaatatttrtagtcatagagttatggagctgtggttcttctaccttctcttggtcttgggaaagaggcaaaatggggatgtgtttgaagcattaatcataatagagaag

SEQ ID NO: 41826 - DNA, 201 bp, Homo sapiens
gtacctctgaaagtggagcaagcaaacaatgctcgtgatgccctggcaaagacagtgtatagccatctttttgatcatgtggtaaacagagtaaatcagtrttttccttttgaaacatcatcctattttattggagtcctagatattgctggttttggtaagtagagtttcttttgtgagtatatatttgtttcatatttt

SEQ ID NO: 41827 - DNA, 201 bp, Homo sapiens
caattacccctcttcccaccaaatgcggaggtgttagctaaccctttgcattcagacataaagcagctaaatgacatgtattggaactagttcgtagtgcrtcctgtttctctttgggctttcccttcatgcttgtgttttggcctaaccagagttcacttccagatttggttgacctgtatgttgtctgctactaggtag

SEQ ID NO: 41828 - DNA, 201 bp, Homo sapiens
aaaagcaagcttaagttgctcattaaacatttaacccataaatgttctaggcaatggttaacatatattgtttggaagaaatctgggaccaaatggtcacyacagagctaaatcaatccttggcattcagtgatagggatgggcccagaaggtgctacgagctgtattaaactccttagtagcagggtgaatacagtaggt

SEQ ID NO: 41829 - DNA, 201 bp, Homo sapiens
gatgcagggcacacacccacagctgtctctagaattgcatttgttatgtaaagtggttcatgctacttgaaatgattttctaatttgttgtacggagtttmgtgtttattatttttattatattttgataatttctgcacatctttaaatcactgaaaatgaaaaggtttccacatgaatgagaatattagcaacatattt

SEQ ID NO: 41830 - DNA, 201 bp, Homo sapiens
ggaaaaaaatcatttatgcttcttctgggtaaaaacacaatttagtggtttcctttatgttcatgattttttacaaaataaaaatatatgaaatgtgccaytcattcaaatttttatatctttttttggtagtagattatttttttcctgatcataaagcaatagaaaatacagaaagatatcacgaggtaaagaaagctt

SEQ ID NO: 41831 - DNA, 201 bp, Homo sapiens
atttattaaatactaacgtttacatctttattctacagggcaaacccggaaaagatggtgacaaaggggaaaaagggagtcccgtaagtgtttctctgtgrtttttacaagcaggctcactgttcctaccactggcctctgacggttactgcttctctcttcggtttcagggttttcctggtgaacccgggtacccaggac

SEQ ID NO: 41832 - DNA, 201 bp, Homo sapiens
aactatagaacaatacaaaagacatattcctaccattcttatgcatacaatgaaaagggatgtcaaccagagcatgttttaatggtgaatttcttctgagkcttttgacactgtaggaatgactttggggtgaagactttgatagtctggtacacagtgagctggttccagcctcgtttccctccattgttctcctggtcc

SEQ ID NO: 41833 - DNA, 201 bp, Homo sapiens
gttcttcctgctattattaagcaaccatgaaaaaatgtcaactatagaacaatacaaaagacatattcctaccattcttatgcatacaatgaaaagggatrtcaaccagagcatgttttaatggtgaatttcttctgagtcttttgacactgtaggaatgactttggggtgaagactttgatagtctggtacacagtgagc

SEQ ID NO: 41834 - DNA, 201 bp, Homo sapiens
tgaagaaggattaacctcattaaaatgtctcacaaggaggtttggtattttgagttcttgggctagagtcagctcaagcaacaatagaatgcctaaaatartgttagagcattgttcttcctgctattattaagcaaccatgaaaaaatgtcaactatagaacaatacaaaagacatattcctaccattcttatgcataca

SEQ ID NO: 41835 - DNA, 201 bp, Homo sapiens
ctgtgtgatgcttcttaacagattatttctcaggattagaaacgtgaactttcccctcagtgtggtgatgcttgtccagcaatactgtcatctcctgaccrttagtcaccacctctgggactgaatgacctagagttcaaactaagtgagatttcattcccatataagtatggaccatgttctactggaaatgtagtttag

SEQ ID NO: 41836 - DNA, 201 bp, Homo sapiens
aaaatcacttaaaaactgaatctgcctaattttaaaatttgtctcacttttcatgccatcaataacattttggcttacctccttccaaaatcagctgttaratgtaccataacactgaaatagcttcaatactgatccaagcaaaacataatttaaaagcacattttgaatgataagatgctgtggatttgatcagatcct

SEQ ID NO: 41837 - DNA, 201 bp, Homo sapiens
cttaaaaatgatttttgctacttaccagattttccatacttattcttttactgttcttaatcttgttctttgttttcctctttaaaaaaaaattttacttytctcctggaagaatgatactcactaaatccacttaactgtatagaaattgttaactgttacatgccagagagaactggtgatatacacacacgtctccta

SEQ ID NO: 41838 - DNA, 201 bp, Homo sapiens
aaacagtgcaaggacatgttaatgataaaacgaatgctgcacagattgtgttccctctggggagtctggaaatcaaaatcccagaagccgcctgccgagcrcttgttagcttgcaacgcgctcacgtgtgtctgtgtagcttagtgtgttcgcacttgttgtctaaccaggaaaatgaactttaaaaggccttcaactagg

SEQ ID NO: 41839 - DNA, 201 bp, Homo sapiens
atttcctcataggatgtgcataggatctcctttcctgaaagccaggactggcatgcagctccctggtttggggttgcagccacctgtgtggagtcagttgkctgggctgtgtccttgtcaccagaatcagctcccctgactctcagcgtcacacacttcctgatcccaggctcacgcgctgtgaagcctggtgaaagcaca

SEQ ID NO: 41840 - DNA, 201 bp, Homo sapiens
acttatattttgcagagatctttattttcatgtgtcatgcgtgtgcaaagcaaaatgaaatctattcatttttgttgtaatcgtcacagaatgagagataytaaagagagaaaaatagttttaatttactgtaggcacactctattttaccagaagaaatgtttaatctgctttctgcaagacaatctttatagtaagaat

SEQ ID NO: 41841 - DNA, 201 bp, Homo sapiens
agagcccagagactatgaggctttagcctttcctcttctttatcctctgcgtctgctcagtcacaaagtctcctgcttctttctggatgcttcccagaggygcccgcagctttcccttcccacggctgggactcccttccagctctctttgccttgtgccaggatcaccactgaaccctcatggccctgcccctcctccca

SEQ ID NO: 41842 - DNA, 201 bp, Homo sapiens
tttccgaggaagtgtgcagttgatgggacaagtatctgggcttttgtaaggagaataattagcccccaacttatattttgcagagatctttattttcatgkgtcatgcgtgtgcaaagcaaaatgaaatctattcatttttgttgtaatcgtcacagaatgagagatattaaagagagaaaaatagttttaatttactgta

SEQ ID NO: 41843 - DNA, 201 bp, Homo sapiens
gatttccatctacagttgttacttaaggttgcttagatgggtaacaccagtaacagcaccaagaatacaaccataattgggtactgatttcatcaattctragatgtgcatttattgatgttttaacaactctggaattgggatagatctaacaattgataatgtgtcattgtttaattagtacccttcttgatttcttag

SEQ ID NO: 41844 - DNA, 201 bp, Homo sapiens
tcaggtgatccacccacctcggcctcccaaagtgctgggattacaggcatgagccaccgcgcgcagtctattatttattaaatactaacgtttacatcttyattctacagggcaaacccggaaaagatggtgacaaaggggaaaaagggagtcccgtaagtgtttctctgtggtttttacaagcaggctcactgttcctac

SEQ ID NO: 41845 - DNA, 201 bp, Homo sapiens
gagactctcctgagctatatcagttgcaaggcttcccaggcaggcgaggtccttccctgtttaaggatccagcactgaaggtgccaccgccggctgttcaragaggcttctgaagagccctgggccatccctgaaaccttcggtcctgctctgagagcagcaggttggttggactttgccacccagaacaccagacagtgt

SEQ ID NO: 41846 - DNA, 201 bp, Homo sapiens
aaaacagatttatagactgttcagtccataaaatacgagcccctttgagagcagagacagctggaactggattggtccaagcctgatctgaggctcacccsgctggatcagggcttcttaaatgtgccccaagttggagatggcttggtcaggaggagggagctgggctggggggcaggaggggggcagggccagtcatca

SEQ ID NO: 41847 - DNA, 201 bp, Homo sapiens
aagttcaagaaaaaggagacttcgccaccaagggagaaaaggtatgagtgggcttcatcagtgaatactgattttctaattttggacaaattccaaaagayaaagagaaaatgggtcaaaactcagtttttccagctacattcaatcctggtctggaaaacagatttatagactgttcagtccataaaatacgagcccctt

SEQ ID NO: 41848 - DNA, 201 bp, Homo sapiens
tcgacagggtgaccaaggggtcagtgggcctccaggagtaccaggacaagctcaagttcaagaaaaaggagacttcgccaccaagggagaaaaggtatgartgggcttcatcagtgaatactgattttctaattttggacaaattccaaaagataaagagaaaatgggtcaaaactcagtttttccagctacattcaatcc

SEQ ID NO: 41849 - DNA, 201 bp, Homo sapiens
aggcagtgaggagcagcccgtgactccctgagccccagtccttcccatggggactgtgcacaggctgagctccttagtccttggttctgcaaacttgcttycccccatttgttcttcttcaggaatctcttctgggcattttttaatttgggggaaggggcaattgatgatgtgtccacagtcattagacagagatgactt

SEQ ID NO: 41850 - DNA, 201 bp, Homo sapiens
aatatagtgactctgaaatgtatgcagttgtaatttttaggcgtacccggcagttaggatgcccgaggagggagactcttgatggttgtcttattctgggrttacctaaaatgccttcttttttctcaagctctattaggtagtttgtattcctttcctccgtgccatcagaagccagtatacactatacaggggcacgca

SEQ ID NO: 41851 - DNA, 201 bp, Homo sapiens
atcacgtaagaaaatgccattatgggcctttgtccctattaatgatactatcaagtctatttcttctttcataaagtggtacccagtagcacagcttgtgrcaaactgtttttaggaaatgattttaaccaacaaatgaagggtagggcagagtgatgcatgcgatgtcagggctgatgtgtctgccacacacagtgcgta

SEQ ID NO: 41852 - DNA, 201 bp, Homo sapiens
cttggatgcacccagcacatggaggctgccatacccagtacactcagtgctcagtaccaaacccggtacccgtactcattccgtgcgtagaggaagccccygagagctggcagcatctctgtgtgtgcttcagtccattgtgaagatccgtgatcctaatatttcagattggaaaaatccattaaaattttgatttaaaga

SEQ ID NO: 41853 - DNA, 201 bp, Homo sapiens
gcagtattcctgccctgacgtcaagcctcatggtgtggagggagctcccggcggggcctcgccacagagttttccatgaccccgcggcacccaccgcagcyttcccacccctttcccagcggcggcattcaggaaatggtcctgcagatgtctcttctgatgtctcttctgatggtggttgggctcaaggagttggccttg

SEQ ID NO: 41854 - DNA, 201 bp, Homo sapiens
cattcacatacttctagtgaacacatatacatccttttaagagttcagttgtatgtctcatagagcaaaggagagtgagcactcacgccttcctcttaggsaaagcagaccctctaggggatctccttgcatctgtcccccctcaaactgtggtggcagtattcctgccctgacgtcaagcctcatggtgtggagggagct

SEQ ID NO: 41855 - DNA, 201 bp, Homo sapiens
ctggggagtctggaaatcaaaatcccagaagccgcctgccgagcgcttgttagcttgcaacgcgctcacgtgtgtctgtgtagcttagtgtgttcgcactkgttgtctaaccaggaaaatgaactttaaaaggccttcaactaggctttaattaagaggaaaagatgacaaaacctacacagcagcatgtcaaaattaccg

SEQ ID NO: 41856 - DNA, 201 bp, Homo sapiens
gctcgccaccatagagaggagcgagatgttcaagtaagtgggagcactgcttttttgcaggctgctggcccctttgtgactttattttttaatcatccgcratccgtaacaccttccaatgcaaagtctcaaagatggttagcaatgaatatttgatgctgttcgacatgggcagatgaccgagacgattttcaaaggcag

SEQ ID NO: 41857 - DNA, 201 bp, Homo sapiens
tccacccgcctcggcctcccaaagtgctgggattatagacatgagccaccgcccccagccatcctgctctatttttgaattgaatgttttaatactgagayaggcttataaaaccaacggggaggtactaaacctcagagtctaagcaatgggcacaatgttttctacttaatatgtaattggaccagaaagactgagtga

SEQ ID NO: 41858 - DNA, 201 bp, Homo sapiens
acaatctcggctcactgcaacctccgcctcccaggttcaagtgattctcctgcctcagcctcccgagtagctgggattacaggcatgtgccaccacgcccrgctaattttttgtatttttagtagagacagcgtttctccatgttggtcaggctggacttgaactcctgacctcaggtgatccacccgcctcggcctccca

SEQ ID NO: 41859 - DNA, 201 bp, Homo sapiens
ctaagaggaaagagttgggactctgacctctaaaacccttctaaatgttagtgtcctctgagttgagatctttcctgtgaagctggaggtacttcaacacwctactgttactggcctttctagagcaaaagctattttactgaaaagaactttggtatgcagtacatgtcagaactgtccactcatttgaagtgaaggaag

SEQ ID NO: 41860 - DNA, 201 bp, Homo sapiens
tgacacaatctcggctcactgcaacctccgcctcccaggttcaagtgattctcctgcctcagcctcccgagtagctgggattacaggcatgtgccaccacrcccggctaattttttgtatttttagtagagacagcgtttctccatgttggtcaggctggacttgaactcctgacctcaggtgatccacccgcctcggcct

SEQ ID NO: 41861 - DNA, 201 bp, Homo sapiens
cctcatcatagcctgatgctgggagcagaagctggtgcgtccctcacagaagcagcagagctttctccatgcagcctcctgcaccaccactctctcaagcsctgcgtccggcctcagctctcccaggggcacatggtcttacccttacagagttacagtggccgaacctgacctgatatgttcacacctaatggctactct

SEQ ID NO: 41862 - DNA, 201 bp, Homo sapiens
agtagggcacaattttctaagtactttctagctttctgcagacaagactcacgaaataaatactgattgctaattgctctgacgaaaagaccgctggattragagcaaggagaactgcattttcgttctgtcttggacacagctaaccctggccttagtttcttcatatgcaatatggagaatttggccatgtgaatttta

SEQ ID NO: 41863 - DNA, 201 bp, Homo sapiens
tactacaacatgcacgagcttgaaagcagaagcttgagttagggagagaacacccgagggctggccgtggcctccacgaaggccctcctggggcagtgccrcctgggacccttcccacagggcaaggactgctctcctagccccagggcttccctttcccgcaaaagccagctgaaacagaaaacaaggcccctgtttgat

SEQ ID NO: 41864 - DNA, 201 bp, Homo sapiens
cccaggaaaagctagaggaacacataacaacacatctgtgttcagttagaaaaacatgggctcaaagaaccagatcattacctttccccctcctgcctccygctccagatgggggtggcatgtagcaatctggaatggtaaaaatcggtgctctccatccatgcccccaggagcgctgcctgattggcactgtctgtacaa

SEQ ID NO: 41865 - DNA, 201 bp, Homo sapiens
tctgtgagaaaagaggaggtggtagacatcaaaacaccacagaagctggtgaccgctgttcagggaggctttcagaagagcccaagcagtgctgagcccaktgatttcaggagcttctaggcaatagctgccttgcagtgtagggtttggttgggaagatgggacgctaaggctgtgcaagctgcatgggcactgccacca

SEQ ID NO: 41866 - DNA, 201 bp, Homo sapiens
ttcttgtgaaacccaagtctcaggatgctggaggagaagccattggtgggtatgggtgttctttgcagttttaactttccaggaactgagcaacgttctartgtgagtctcttgggaaagtcaatttgactctgctgactcaacataactcattttagagctggcccagtgcccactcccagagtttcatctctcactggt

SEQ ID NO: 41867 - DNA, 201 bp, Homo sapiens
agaaatagaacagctctcatgatatctgaaagtcatggattttgaaagatcaaaattcaaaagataaaaactttgaattttgatcttttcctgggctagcrttgtgcgataggcaactcttgcaatgccagtcaggagccacaagccgttctggttttcacttttgatacagaatttgataaattacacaagatattaaac

SEQ ID NO: 41868 - DNA, 201 bp, Homo sapiens
gagtacttcttcaacaagggggtgcttggctgagatcccatgggtgtgtctgaggtgccagggcccgccggggagggtgtgaatgtgcctgtttcacatgraggcagcgctctcgaatgtgctgaggggtgccagggccctggggtgctgctgtgtgggtcgcaggtgcctggaggtggatgaagggtgggtgtctacgga

SEQ ID NO: 41869 - DNA, 201 bp, Homo sapiens
ctgagtacttcttcaacaagggggtgcttggctgagatcccatgggtgtgtctgaggtgccagggcccgccggggagggtgtgaatgtgcctgtttcacaygaaggcagcgctctcgaatgtgctgaggggtgccagggccctggggtgctgctgtgtgggtcgcaggtgcctggaggtggatgaagggtgggtgtctacg

SEQ ID NO: 41870 - DNA, 201 bp, Homo sapiens
acatgcacaaccatccacaccgtccatagctgcagcaagtgaggttccaagcctgtagcataacacttgttttctgtactgtttttctcgttttgaagatrtttttaaaaatatatatttgagaaacagaatgttaggtagtaggtttagaaagaggcatctgtgattttggttttaatgagtgttcatgctgataggtta

SEQ ID NO: 41871 - DNA, 201 bp, Homo sapiens
ttcggtggctgattttggcctctgattgctgcagtgtgcaacatgcacaaccatccacaccgtccatagctgcagcaagtgaggttccaagcctgtagcakaacacttgttttctgtactgtttttctcgttttgaagatatttttaaaaatatatatttgagaaacagaatgttaggtagtaggtttagaaagaggcatc

SEQ ID NO: 41872 - DNA, 201 bp, Homo sapiens
aatctctgtgtgtcagagaaagcccacagttgcattgaggacccacaggaaagctgttgtcaccaccaacccttgtccgggtgtcaaaaggcctgaaacartgattgcccataatttgtctaaatcaggagcaaacgaaaatagtgacgttctagagaacagtgtcttccagcacctcctctgagttctcaggacggtggc

SEQ ID NO: 41873 - DNA, 201 bp, Homo sapiens
aaagcagtaaagtcagaccagtttctttcagaaccatttgtacagcatttaactgaatacttgagcacgtttgatttttaaaataatgctgccaggtaaamcaggcaggtggagtcatccctgacttacagatgatggcaaagctgattttcagagcgtcccaggggttggcgctggagccagcaccagaattccaggctt

SEQ ID NO: 41874 - DNA, 201 bp, Homo sapiens
aaaagcagtaaagtcagaccagtttctttcagaaccatttgtacagcatttaactgaatacttgagcacgtttgatttttaaaataatgctgccaggtaaracaggcaggtggagtcatccctgacttacagatgatggcaaagctgattttcagagcgtcccaggggttggcgctggagccagcaccagaattccaggct

SEQ ID NO: 41875 - DNA, 201 bp, Homo sapiens
tttctttgggtgactgtatatgttttaaaggaattaatggtgtttacttaaaagagattaaaattcagttatttattaatttagattgatctcactactgytttttcaaattaatgaggttaggctaatagtgggttttgtaaaacctccagctctgctgagattaccttgtattctatgggcaaagttggtttgtctagt

SEQ ID NO: 41876 - DNA, 201 bp, Homo sapiens
ttcagttatttagttaagagctggtaaagattttgcagacaaatggaacccaccagtgatgatctaagacaaacctttgtagacagtggaagaacatcaakaagtggctaaatgacaacagtggttttgatgaattctatgatatttgttataataattgttccccaaattgaagaaggattaacctcattaaaatgtctc

SEQ ID NO: 41877 - DNA, 201 bp, Homo sapiens
gcttagggagaagaatgctggtttcacttattaactacaaggtggccctcctgggagggtagatgaagtaaataaatagtgtgagccagttaactctagtwcttattgaccacaaatgtcagaagaatgcgataaggacagggtgttggtgtgtctctgataacggtgtctttttcttcttctcacatcagggttctgtag

SEQ ID NO: 41878 - DNA, 201 bp, Homo sapiens
tgacattaagtagttaagaaaaaaaggcaggaaatgatactgtaagtttaatctttaaaacgtctacaaagtaggcatagtgaaaatggcattaaataagrtcttactgatagaaatttttaaataattgggccacaccttggattgaaatatatctccatattatcttttgaaaacaggcttgccaactttatgaagagc

SEQ ID NO: 41879 - DNA, 201 bp, Homo sapiens
gaacccgcgtcgcgggtatgctcggcagctgggcgccttcaccagtcccgggtgcgcgagggagttgggggctggagggccgggagcgcccaccccgcgcygctcagagacccacactgggagctccgagctcctagcccctgggagcagctttgggcgtatttctccttgtctggagaccctggtggctgaggctgaaaa

SEQ ID NO: 41880 - DNA, 201 bp, Homo sapiens
tatcgggggcctcccgggccacagggacccccgggagaaataggtaagacccacatgtgaaaaggaccaggtcagagtttgctttggtgtgttggcatctytcctgtgaaagggatttcactccatagaaggcctgattttcggcagccaatcctaaagcataatcagaagaatgttgggccccacttccaggatttgtcc

SEQ ID NO: 41881 - DNA, 201 bp, Homo sapiens
attgggagctctcagcctccacggtcttaggtctgacacctctaaataagaagcatgacatttgggtagctttgcaaatatgggtgttgccctgttaaackaatccccgagggagtcaacttcaaatagaaattaacaaagggcaaaaagtataggtgacattgttcactttttgggctgagtaacacttgggatttgttc

SEQ ID NO: 41882 - DNA, 201 bp, Homo sapiens
gaatgggagtgtgtccttccctcagggtctctgggatttctggaaacaaatggtgtcacaggagccacccccacacagccacagtgcagagccgaagtgcygtctttctgtgttaccagtgctggtaacatcatatcagatcatctaaaagctggttagtcagtaggttcagcatcaatagtttctatgaaaagatcaagg

SEQ ID NO: 41883 - DNA, 201 bp, Homo sapiens
ggtaagacccacatgtgaaaaggaccaggtcagagtttgctttggtgtgttggcatctttcctgtgaaagggatttcactccatagaaggcctgattttcrgcagccaatcctaaagcataatcagaagaatgttgggccccacttccaggatttgtccacattgctgggaatgatcaagatggcctcataaagatttcct

SEQ ID NO: 41884 - DNA, 201 bp, Homo sapiens
tgcagtgcaccctctacagcctttttaaaatatgttgggaatactatttgcactgagagaaattcacagattttaatatctacgtaatgagtccctgttcyttgaagttaatttgtaggaaacatttgactgtcagcatgaaatggcaagacacctgccagcttaatttggttttacatgtctaaagcagttcccttttca

SEQ ID NO: 41885 - DNA, 201 bp, Homo sapiens
tctttcagtctctaaaaaaaagttggaaaattaacactatatctaactatacctttaagtatctatcatatatcatttattatctattgattatctatcartatattgatcttttctttcatccatcccttagtcaatactttggaatcactgatatttcccttagttttctaatgcaagagtttaaaaactgtaaatttt

SEQ ID NO: 41886 - DNA, 201 bp, Homo sapiens
ggctggcggggtactgctgatagtcacagcctgtgggagtgagttcaaagatggacagacaggctgtgccccaggtgacttcaccagggagcaggggagayggattggtattggtatggtcacacctgagggtcctgcacctgctaggagtggggagggaggggaagcccaggaaaaatatttcacaaataaattatcatg

SEQ ID NO: 41887 - DNA, 201 bp, Homo sapiens
ttgaaaataaataataatttagtaaaaactttacacagttgtggtcgctcttaatttggacatggcggaatcagcttccctcttactaaacgtttggctgrcatcccggtacccatatacccagagctgtgggaaagggatgatgatagtaccataaactgataccctgaaacaaataatgcagtcatggttgaaggggct

SEQ ID NO: 41888 - DNA, 201 bp, Homo sapiens
tgatgtccaagggcaggagaagatgggtgcccagctccagaagagagagaattggcctctcttctgcctttttgttctatccgggcctcaactaacaatgrcacctgctcaccctgggtgagggcagatcttccttactgtccatgtattcaaatgcccatctcttccagaaacacaccctcaaaaacacatccagaagtc

SEQ ID NO: 41889 - DNA, 201 bp, Homo sapiens
gtacaagtccctgaatctgaaggccagagaacccagagttctgatgtccaagggcaggagaagatgggtgcccagctccagaagagagagaattggcctcycttctgcctttttgttctatccgggcctcaactaacaatgacacctgctcaccctgggtgagggcagatcttccttactgtccatgtattcaaatgccca

SEQ ID NO: 41890 - DNA, 201 bp, Homo sapiens
actggatagatttttttttcttttagaattggcaaaactcaggagaatggactaaattaccttaatgcataagttttctataaacttatagtggaagaagrccaaagaagaacctttacataagttttactggcagtgggatgtttagcagtggtttcttagagacctccctgtgattacatttgtatctattttatgcat

SEQ ID NO: 41891 - DNA, 201 bp, Homo sapiens
gaaatagatgataatttaggaacatgggagttggtataagcatccgtttcctttcctgtctcactcatttgcctttaggaagttatatcgttaatcctaartgtgtgtcttccctgtgtttcaaagaagagtcccccagcctggaggctgctcattcgcattctgggtcacgtgttcccttccaaggcttccctgttctcc

SEQ ID NO: 41892 - DNA, 201 bp, Homo sapiens
tctcagagaagctgtgtgtctgagaccagcatttctgtgtgatgcattcctctcagtaaaacacccctggtctttgagcaccaagagtctaagtctctgtrtgttttgatcctgagatgagcttctaaagccaacggggaggtgctaaaccttagagtctaagcaatggggcacagcatttcccacttaacatgtcattgg

SEQ ID NO: 41893 - DNA, 201 bp, Homo sapiens
ctgccagatattgactgttttgagacttttcttgctcagaaccatgcctgataactagaaggaaaagtaacaacttttgtgggtttctttttttagcttcktttacacaacaggtagaaaaagactattcattgataggtttcctgtttactttcttggcaatgttgacatttgaccttgattcagagctccttgacagga

SEQ ID NO: 41894 - DNA, 201 bp, Homo sapiens
aaatgttggcagtgatggcttgggatggtgagtgggtggtgggtggtgtgtggtgattatgttttgcaagtggtggatagcctaagatgattttgaaacaractaaagctgaatttctaacacttgtcaaatagcctaaaatattttggttttataatagaggttgagttaggagagggtaaaaacacctagctatgatcc

SEQ ID NO: 41895 - DNA, 201 bp, Homo sapiens
tgtttatatactctacaatctatttttattagaaagtttatacctcataatttgcaaactgtaacccagttggtctgtttccacatcttagtttctagccraagatctcaatattttagtctattgacattaagtagttaagaaaaaaaggcaggaaatgatactgtaagtttaatctttaaaacgtctacaaagtaggca

SEQ ID NO: 41896 - DNA, 201 bp, Homo sapiens
ggaagaccagggttacgtgccaggcaattcctggcagatgacaatttagtgagagagctatgccacgtgggaccatggaccagagggctggaaggtgcctyctatgtaggaaaatcttagatctttgatccccttacattaaaatatctactgacagttttctttgattttttttgagctataagaaaacttattttatag

SEQ ID NO: 41897 - DNA, 201 bp, Homo sapiens
aagggaaaagggaagcaaatgcttggagtcacccctggagctcctgcccagctgccccaggctgtgcctttagcccaactcctttcattagatgaacatgycctgtttgggggaagaccagggttacgtgccaggcaattcctggcagatgacaatttagtgagagagctatgccacgtgggaccatggaccagagggctg

SEQ ID NO: 41898 - DNA, 201 bp, Homo sapiens
tagggctttttcttttcctcttagtctccccaggatgctgtaataggataccacagactgggtggtttcagcagcagaagtgtgttcctcccgtgctggasgctggaagtccaagatcaaggctccagcagattcgaggtcggctgtggaccccttcttcataggcagcgcgagggcgggggctctctctggggtcttttt

SEQ ID NO: 41899 - DNA, 201 bp, Homo sapiens
gcagtgagccaggatcgcaccattgcactccagcctaggcgacaagagcaaaactctgtctcaaaaaaaaaaaaaaaaaaaagtttatttcttagaaataytcagaaataataggaaagtggccagtgaacaaattcatttgactaagaagctattccgtaattttactttttacatattaagataatgataaaaaaagat

SEQ ID NO: 41900 - DNA, 201 bp, Homo sapiens
ctgccctttctgttcctcccaccacaatttcccatccacttttcctttctctctgttcagggctcatgtacacctgtgtgattttccagggtgtcacgacragccctgatgacccgcgcctgccacctgtgtgctttgtcctctctacttcacatgtgtgcatgcacacatcacgtgcatgcacatatcacatacacgcac

SEQ ID NO: 41901 - DNA, 201 bp, Homo sapiens
ggaggtgcagtggcttctgcaggaggctggggaggctccccgtggtcttagaggaggtgcaccatcccgtcccacctcactcgccccctttacccttcttycctttataaaatttctgccctttctgttcctcccaccacaatttcccatccacttttcctttctctctgttcagggctcatgtacacctgtgtgattttc

SEQ ID NO: 41902 - DNA, 201 bp, Homo sapiens
tggtgagtgggtggtgggtggtgtgtggtgattatgttttgcaagtggtggatagcctaagatgattttgaaacaaactaaagctgaatttctaacacttrtcaaatagcctaaaatattttggttttataatagaggttgagttaggagagggtaaaaacacctagctatgatcctataactctgacaactcaatttcag

SEQ ID NO: 41903 - DNA, 201 bp, Homo sapiens
ccctgtttgacgtcaggtttttcccgatttggaaatgttggtgctttgagaaatgtccatggacaactgtgcctcctcacctcccccttctcacttccacrtacaagactccagaatgttaaaggacacatctccatgagtgtgaaactgtttgtcgctgtttgactctctgtgtccccatgtggggctccccagtctcat

SEQ ID NO: 41904 - DNA, 201 bp, Homo sapiens
tttttgcttgttgtccagctgaaatccactttacatagagatagattgtgaattataaaggaaacatctcacattgtcttcttccttgtctaggcacggcyggcagctgcctgcgcaagttcagcacaatgcccttcctgttctgcaatattaacaacgtgtgcaactttgcatcacgaaatgactactcgtactggctgt

SEQ ID NO: 41905 - DNA, 201 bp, Homo sapiens
atggatgtccaatgggaagaaattgatctgcagggggcagggaagggcaaaccgaacggtcattcgcaggccccaaaagctcaggcagccgctcaggtgcrgtggcccatgatttacgcctccaaattccatttccctgtttgacgtcaggtttttcccgatttggaaatgttggtgctttgagaaatgtccatggacaac

SEQ ID NO: 41906 - DNA, 201 bp, Homo sapiens
cagggcagccaggatttataggcgaaattggagagaaaggtaagaaattttgatttttttaaaatggtggttgtgtctttgcgtatgattttttcccacakacttaccggctttggagccaagtgggggtgggcagagttagggcgtaggttccttttatttggaaccctcttcacaatctcttcctagaataagcatctt

SEQ ID NO: 41907 - DNA, 201 bp, Homo sapiens
atagatgtgaatttcttacacacgtcttgctagagcttgaggacttaaccagagaattttctgtgggcgtcccgctgtagcatgttagggccttaggttartttgccctcctaggtgagaaatccacaaccctaagacttgagtacccaagtctgtggcatgtggtgacatgcttgattttgaagtggttttccctagaag

SEQ ID NO: 41908 - DNA, 201 bp, Homo sapiens
agccaggatttataggcgaaattggagagaaaggtaagaaattttgatttttttaaaatggtggttgtgtctttgcgtatgattttttcccacatacttascggctttggagccaagtgggggtgggcagagttagggcgtaggttccttttatttggaaccctcttcacaatctcttcctagaataagcatcttccggaa

SEQ ID NO: 41909 - DNA, 201 bp, Homo sapiens
atttcctcacatgagaatctgacacgagaagctaacagtgattcctggctaatttctaaaaagctgtagtgaaatcagaagggttaaagacccttggtacsgtttctcctttattagatatttggacaaatacctgaaggtaatgaatgatagatgtgaatttcttacacacgtcttgctagagcttgaggacttaaccag

SEQ ID NO: 41910 - DNA, 201 bp, Homo sapiens
atgtgcgtgtacttaccaacgtccagactcctccctcccatcggccagccttgcttggtctagctattattcaaaggggaacatgcgtgagatatcacttygtttttgccatctaatggattccaccccccaaagtatctgactttgacactcaggctcatctgcaggacccgagggtgtcttccctcccctcccgttggc

SEQ ID NO: 41911 - DNA, 201 bp, Homo sapiens
ttggtgtggcccagcaccggcagcctctgtcccgactatttatgggaaaaaatatttttttgtaaatatgatcttgacaaaacattggctggcaggaaaayagctttcttttcaggggagcaaaatgagagtgtatattttaattcaagatcaaagacttaacataaaacaaaccctgacaaatgaaaactgggcaatggg

SEQ ID NO: 41912 - DNA, 201 bp, Homo sapiens
caattaagtagaattgtagcatttctagtgagtagtgacaactgtgtggatatctcataccttcttgtaatactttaaccctgctgatacccagatcctcrgcaaagatatagagaagcagcacattatcctgttattactaattagattgtctataaatcacagctcctgtccacattggctctgcattgcaataatatt

SEQ ID NO: 41913 - DNA, 201 bp, Homo sapiens
ctgcattaatcagagaaaacagctcttgggaccagctgataaatgctgtcatagcaaagatttgacggtttctactatagtgactccaaaaagggacattsccaagccacagtcttgtgagcagagtctcaattaagtagaattgtagcatttctagtgagtagtgacaactgtgtggatatctcataccttcttgtaata

SEQ ID NO: 41914 - DNA, 201 bp, Homo sapiens
tactggccttcccggctttcttcttcttttcatttgtagcgaagtgtcaccattgtggaacatccatgtgtgcaatgctgagaagagttcccccccttttyttttagaggggacttatgatggaggatggaagaaatgagaattcagagagacaagcatgggccacctgccacgcccacaggtgatctgcgctacatgcat

SEQ ID NO: 41915 - DNA, 201 bp, Homo sapiens
tgtccaaaaaagggaatttaaagttaaactagagatggaagactggtgtacataaataacaaggcgagagtaaaccatcacattccaggagaagctgttgrgaaaacaaatacaaaagtctttctgagaaggaagtgatccctgggacctggagcataaaatcaagggacagcttccccaattcagcaggaccccagcctc

SEQ ID NO: 41916 - DNA, 201 bp, Homo sapiens
accatagtctgtgaccctgcagtgtccaaaaaagggaatttaaagttaaactagagatggaagactggtgtacataaataacaaggcgagagtaaaccatyacattccaggagaagctgttgggaaaacaaatacaaaagtctttctgagaaggaagtgatccctgggacctggagcataaaatcaagggacagcttcccc

SEQ ID NO: 41917 - DNA, 201 bp, Homo sapiens
cagaatggacaaaatgtcttatattctgtagatactataaatacattttagtgcaacagatcattgctggcgttataatctcatagttttcaagtaatcartaaatactagatagcttgatctgagttcaacagttaaattcagcaggtttctactggatttcagagagtctttgctgagttgtttattttcccacttgct

SEQ ID NO: 41918 - DNA, 201 bp, Homo sapiens
tgttcataaagtattttgaaataatgtcagaaaatgtccttcaaggagcacagagtactttttggaacattaaaaaattctcagtatttctgcttctcacrttttgttttgggaaataagaattctggctgtaggagatggcggggggaggttagtcttcccagagtcgtgtcatcacagaacagtgttgctccttacagc

SEQ ID NO: 41919 - DNA, 201 bp, Homo sapiens
atgacagaatggacaaaatgtcttatattctgtagatactataaatacattttagtgcaacagatcattgctggcgttataatctcatagttttcaagtartcaataaatactagatagcttgatctgagttcaacagttaaattcagcaggtttctactggatttcagagagtctttgctgagttgtttattttcccact

SEQ ID NO: 41920 - DNA, 201 bp, Homo sapiens
gagaatctgcatttctagcaggtgagggtgcggctactgacagcccgacttctttcactgaggccgctgcttgagcagccttaggtgcaggcctgcagtgycgggacgttagtttgcactcactttgaggctgaacccctgcgtgtaacatggccctccccgttctctttgtcttctttttccgttgatttctgctcctgc

SEQ ID NO: 41921 - DNA, 201 bp, Homo sapiens
atcctcaacagaaactggaatatctccagtacaaatctcttttgactaagttctgctttctatggcgatatgacagaatggacaaaatgtcttatattctrtagatactataaatacattttagtgcaacagatcattgctggcgttataatctcatagttttcaagtaatcaataaatactagatagcttgatctgagtt

SEQ ID NO: 41922 - DNA, 201 bp, Homo sapiens
ttatttgcaaaccatcagtatcctcaacagaaactggaatatctccagtacaaatctcttttgactaagttctgctttctatggcgatatgacagaatggrcaaaatgtcttatattctgtagatactataaatacattttagtgcaacagatcattgctggcgttataatctcatagttttcaagtaatcaataaatact

SEQ ID NO: 41923 - DNA, 201 bp, Homo sapiens
ggaccagtgtgatactatacagtaaggcaggtttcagatgagtgtgggaaaaatgtcctaatcgcagagtggcactctccacgtcagaagcgggggctgcytgggaagaacaagcttctctccctgctgggagggctggcatgaggctgcagggcagttgtcaggggtcccagagcccagaatgcagtgggaagttacgct

SEQ ID NO: 41924 - DNA, 201 bp, Homo sapiens
cttctatcctcatagaaattattttgatattctcaaatgtctacacattaaattgattttgattggttgttctttaaacaggacagtaggaggcacagctsagatgcagttaaagttaccaagctgggtcagaatgtcacagccttagaaatttggaaattattacttctaagacatattttcccacatctctttgaggag

SEQ ID NO: 41925 - DNA, 201 bp, Homo sapiens
gccgaaaaccacatcatctcaaaagggaatggtttaagcacagtattcatcctgcttcctctttacagcagaccatacttctagggcatcatttaattttycaaaccatgttttgggagagagaatgagaaaccacatgccctgagaagtggaacccaaggaaggagaggggagggagggtgtgtggaaggtgagggaggg

SEQ ID NO: 41926 - DNA, 201 bp, Homo sapiens
ccaagtgggggtgggcagagttagggcgtaggttccttttatttggaaccctcttcacaatctcttcctagaataagcatcttccggaacttagttgatgrtctgggtgggaaaggtggagacagccctgaaagtcagagttttgccccttctccctttccgaggaccgtgaagtcagtcttgctacagtgggcgtggtca

SEQ ID NO: 41927 - DNA, 201 bp, Homo sapiens
gatgctgtgtgaagagcttgctaacctcgggcaccttagcactgatagcaccgctgccattatagcacgagatactgttctcttcaaattaaaaatggcayttctgtgtggcagcccaatttgtataatcttatggatgccagtgtaaagacattctgattttcttattaagaatcagtggatcattaatatctcaataag

SEQ ID NO: 41928 - DNA, 201 bp, Homo sapiens
ctgggatgtctcagagcctgtaataagatagtgtatcatctggaccttccgtgggtgctgcgtcatatacagttccccacacttatttgaacgcccccctktttttttctttttcttttttgagatggagtctcactctgtcactcaggctggagtacagtggcacgatctcggctcactgcaacctccatctcctgggtt

SEQ ID NO: 41929 - DNA, 201 bp, Homo sapiens
aattggagagaaaggtaagaaattttgatttttttaaaatggtggttgtgtctttgcgtatgattttttcccacatacttaccggctttggagccaagtgrgggtgggcagagttagggcgtaggttccttttatttggaaccctcttcacaatctcttcctagaataagcatcttccggaacttagttgatgatctgggt

SEQ ID NO: 41930 - DNA, 201 bp, Homo sapiens
atcccaccccattctggattgcttttccctgtgcattaggaataaaacctctctaaggggaaggcattttgaagtaagcctgtttcaggcctgtgagaggkctgcagaaacacccccagcgtgagcactgggtcaccccacagcccctgcctttcggaaatcctggtgtagagtccgctccacaaggagctccttcctctg

SEQ ID NO: 41931 - DNA, 201 bp, Homo sapiens
ttcaaatagctggattagcagagctttattctctgtgtctgtctctctgtttcctctatctgtctccatctgtctgtctctctgtctctctctaacacacrttaggagaaagagagagtatatcaggggagatcaggaataggagggatttgagacagacctctgcagttatgttggagcaagtggggttcttctgtaagt

SEQ ID NO: 41932 - DNA, 201 bp, Homo sapiens
tctttgcgtatgattttttcccacatacttaccggctttggagccaagtgggggtgggcagagttagggcgtaggttccttttatttggaaccctcttcamaatctcttcctagaataagcatcttccggaacttagttgatgatctgggtgggaaaggtggagacagccctgaaagtcagagttttgccccttctccctt

SEQ ID NO: 41933 - DNA, 201 bp, Homo sapiens
cctttacacatcggatgccaggagcacccccaccccagcagtcgtgacataaatatatctccagctgttgctgaatgtctcctggcggggggtggggggtrcagactcaccctggatggaataccgctgaactaaccccatcttctatagctaataaaagacaaataacaggattcaggcactaaccagagtacgactcag

SEQ ID NO: 41934 - DNA, 201 bp, Homo sapiens
tctgtgtgtgtgtgtgtgactttggctctttgctgcacctgaatatatagcccttcttagtggtggtcatggatctttggtttgatttttagcttaaccaygtccatggctaaaggattgtgtttacgtggctcgctcattcaaatagctggattagcagagctttattctctgtgtctgtctctctgtttcctctatctg

SEQ ID NO: 41935 - DNA, 201 bp, Homo sapiens
cttaccggctttggagccaagtgggggtgggcagagttagggcgtaggttccttttatttggaaccctcttcacaatctcttcctagaataagcatcttcyggaacttagttgatgatctgggtgggaaaggtggagacagccctgaaagtcagagttttgccccttctccctttccgaggaccgtgaagtcagtcttgct

SEQ ID NO: 41936 - DNA, 201 bp, Homo sapiens
ccaaccagcccgggctttttccacttggtggtattgacagtttgagtgggataatttttggttgtgggtctgtcctgtccattgtaggacgttgagcagcwtcccagcctttacacatcggatgccaggagcacccccaccccagcagtcgtgacataaatatatctccagctgttgctgaatgtctcctggcggggggtg

SEQ ID NO: 41937 - DNA, 201 bp, Homo sapiens
ggaagaaaccaaccagcccgggctttttccacttggtggtattgacagtttgagtgggataatttttggttgtgggtctgtcctgtccattgtaggacgtygagcagcttcccagcctttacacatcggatgccaggagcacccccaccccagcagtcgtgacataaatatatctccagctgttgctgaatgtctcctggc

SEQ ID NO: 41938 - DNA, 201 bp, Homo sapiens
agtggaagaaaccaaccagcccgggctttttccacttggtggtattgacagtttgagtgggataatttttggttgtgggtctgtcctgtccattgtaggaygttgagcagcttcccagcctttacacatcggatgccaggagcacccccaccccagcagtcgtgacataaatatatctccagctgttgctgaatgtctcct

SEQ ID NO: 41939 - DNA, 201 bp, Homo sapiens
agggacagcttccccaattcagcaggaccccagcctctcatgtcctcactaatttgccaggcttgcttagatatagactaggttcttctgtcacacgtacrtgtgaagacacatgttaattgaactgcattaatcagagaaaacagctcttgggaccagctgataaatgctgtcatagcaaagatttgacggtttctacta

SEQ ID NO: 41940 - DNA, 201 bp, Homo sapiens
ttgttatagcatacttgcacaccttctgtgctgtttatattctgaatatataatttatcacgaatgttagatatttgcacacaatcggtagcaatcttacracatcttttctagtgatgaaagcagagtagacaagtgcttgtagataagtatcttgtcttttgtaagtgaccacttagcatgttaatgaacatgtacacc

SEQ ID NO: 41941 - DNA, 201 bp, Homo sapiens
cctgcagtgtccaaaaaagggaatttaaagttaaactagagatggaagactggtgtacataaataacaaggcgagagtaaaccatcacattccaggagaakctgttgggaaaacaaatacaaaagtctttctgagaaggaagtgatccctgggacctggagcataaaatcaagggacagcttccccaattcagcaggaccc

SEQ ID NO: 41942 - DNA, 201 bp, Homo sapiens
aatttactgtaggcacactctattttaccagaagaaatgtttaatctgctttctgcaagacaatctttatagtaagaatatgcaaggaaagttattttttyttttgtagggagaaaagggtgaagcaggtcctcctggcccacctggaattgtgagtaagagtgctgtccctgggtctgtgagagcgctgggggaggaagg

SEQ ID NO: 41943 - DNA, 201 bp, Homo sapiens
aggaggcacagctgagatgcagttaaagttaccaagctgggtcagaatgtcacagccttagaaatttggaaattattacttctaagacatattttcccacrtctctttgaggagcactttgacactattatttgcaaaccatcagtatcctcaacagaaactggaatatctccagtacaaatctcttttgactaagttctg

SEQ ID NO: 41944 - DNA, 201 bp, Homo sapiens
tagcccccaacttatattttgcagagatctttattttcatgtgtcatgcgtgtgcaaagcaaaatgaaatctattcatttttgttgtaatcgtcacagaawgagagatattaaagagagaaaaatagttttaatttactgtaggcacactctattttaccagaagaaatgtttaatctgctttctgcaagacaatctttat

SEQ ID NO: 41945 - DNA, 201 bp, Homo sapiens
tatatcattttaacaaaaatggagaaggtctatttttttctcatcttgagcataaacatttcaggtcctatggttcacacagcattgagaaggggaaagarcccttcctcccactgacagaggaaattttaaacaaacttccccttattgtcttggaagtcctgttaaaataatcaatttaatgatgtgaaatgcctcagc

SEQ ID NO: 41946 - DNA, 201 bp, Homo sapiens
aaggacaagggaagtagaaatgaaaataatgccagcattggcccaaaggcatgggatgaacttgatctgcttccttaggagaaggcacactcgagtgtccrgtgaaggctatgatgcaaaaggctgaggccactgactaattgaacaaagagctcagcccagcagacctgggcacagtttggcacgtggcacagttagaga

SEQ ID NO: 41947 - DNA, 201 bp, Homo sapiens
caacttgcctcagttggagcaacgtaccagtgcgcccctgccgtgtggccgtggggcttatccctgggagtggaatttgggggaaggagccggggccaggscccagctacagcggaggcggctgagcgccttccagagggttgggaatgtcccgctcgcaatcccgccgggagcgtgtggggcccgcgcttgctgcgtact

SEQ ID NO: 41948 - DNA, 201 bp, Homo sapiens
caggatctttgggatagaaggagcagaaccaggcatggggaaacagcagaatgaagttggatatatcacttgacagatttccgaagaagtctgtttcttasaagaaatagaatcaaatagaagagctgaagaagtgttcttttttctgtgtagagacagatattgatcaaagtgtacgtttcccagatgttgttgaaaggc

SEQ ID NO: 41949 - DNA, 201 bp, Homo sapiens
gcaatgcctgcaagacacatgtggttcccttctaattaatggatcaaaatggcgtgcagtacactcatgatcagaattatcttttacttggactaattttrtaaaaatccagcagagaggcgagacccctgtcatttttatgcctagaaggtcatcagaatattgaaattctgactttctagaactggttatacttatgtg

SEQ ID NO: 41950 - DNA, 201 bp, Homo sapiens
agacaaaggtaatctttgctcactgtgctcttccttttcaaccaaccgctgctgcctgattagcagaacaaggggcagtgtcttcaggatgaagccccatscctgttggccaggcagcaacgggatggaggatgggtgctgagcccagagggcaatgcctgcaagacacatgtggttcccttctaattaatggatcaaaat

SEQ ID NO: 41951 - DNA, 201 bp, Homo sapiens
taggtctacttgtccctcaggtagaccttgatcaacacacttgtcatcacagaccttctgttcaggactgaggagaaggtgctgtgagcacaaaagggacrtgttgtgtaaggaagtttgtcttcgtacaacacaccacgcagccacacttaggttgaaatctcctccaggctcccaggcttcttacccagaggctccagg

SEQ ID NO: 41952 - DNA, 201 bp, Homo sapiens
agagcttctgtttttggaggtgtggggtatgccgagaatctgcatttctagcaggtgagggtgcggctactgacagcccgacttctttcactgaggccgcygcttgagcagccttaggtgcaggcctgcagtgccgggacgttagtttgcactcactttgaggctgaacccctgcgtgtaacatggccctccccgttctct

SEQ ID NO: 41953 - DNA, 201 bp, Homo sapiens
actctgttaaattaaagacaaattcagaagcataaacagcaaagtaatgacatcaagaccccttggggctggaagggcccacacaaggatctccttcagcygttgtccaacatgagctcacagcagcatcagctggagggctccacgaaacagctccagagcttctgtttttggaggtgtggggtatgccgagaatctgca

SEQ ID NO: 41954 - DNA, 201 bp, Homo sapiens
ggctggagtgcaatggcatgatctcggctcactgcaacctctgcttcctgggttcaagcgattctcctgtctcagcctcccaagtagctgagattacaggygtgtgccaccacgctgggctaatttttgtatttttagtagagacaagtttcaccatgttggccaggctggtcttgaacgcctgacctcaggtgatccacc

SEQ ID NO: 41955 - DNA, 201 bp, Homo sapiens
atgagctgcaactgaacgccttctatcctcatagaaattattttgatattctcaaatgtctacacattaaattgattttgattggttgttctttaaacagracagtaggaggcacagctgagatgcagttaaagttaccaagctgggtcagaatgtcacagccttagaaatttggaaattattacttctaagacatatttt

SEQ ID NO: 41956 - DNA, 201 bp, Homo sapiens
ataatgctttatttatatgtatattactatgtaatataaaacaatcaaaatttattttcagatccgcagttcccttgtgtgcaagtaatgcctgatttctragcacagtggcatttattttcatatcatccaagagcaccagctttgaaatgtcattttaaaatataagcaactcttttttatcattagcttgaatttttg

SEQ ID NO: 41957 - DNA, 201 bp, Homo sapiens
gtgtcccgagggaggctccatgccagcttcctacaggggccagctttagccttgacactgggagtcagcagagcccgggccaggactgggatggaaggagyaggatcctgctcccctccttgtgtggccttagccaggtttcccaccaagggacctaggccagggagcccagcacctccaggacttttttggcctgacctg

SEQ ID NO: 41958 - DNA, 201 bp, Homo sapiens
ccatgccatcaccttgggggttagaatttccacacaggaatttggggcggggcatggacattcagaacacagcacttttattatcctgggatgcaggacaygtacagtgatgtgtggcgacaaaatgcatcccagctgtgtttaagtaactgtgtaattggctggaaatttctcaatgtgaaaaaattcgagtcattcaga

SEQ ID NO: 41959 - DNA, 201 bp, Homo sapiens
aaaggaccagaatagtgatattttaaaatagattttatttaacaaagtaaacatacatcttaggatatttgtttgtcattcttgtcattctaaaggctagyttttttgttttttttttttaacaaaaccatttacataaaatgctaggccacccagaatgtgacacaaaaatcatgatcttagacatcttttgttctgaaa

SEQ ID NO: 41960 - DNA, 201 bp, Homo sapiens
caaagataaaccttgcctaatcctcacattcagcacatggggcatttttgaaggtactaggtcagtatttgttctctgtttcagcgttgtacagataaacycaatgataaccattttggtattgtttccttcatatttattaaataaacaatattaatatctaatctaattggtggaagatttggctattacatctctaat

SEQ ID NO: 41961 - DNA, 201 bp, Homo sapiens
gccgacctagtgtaaaaacaaaatgactaaaggggttggaataatggaatacaaatctactggtttagatcactagtctgcttatgagctgcaactgaacrccttctatcctcatagaaattattttgatattctcaaatgtctacacattaaattgattttgattggttgttctttaaacaggacagtaggaggcacagc

SEQ ID NO: 41962 - DNA, 201 bp, Homo sapiens
gaacgtcggaagtggggcccaaggaaattactgacattttacagggcagaggcatagggctttttcttttcctcttagtctccccaggatgctgtaatagrataccacagactgggtggtttcagcagcagaagtgtgttcctcccgtgctggacgctggaagtccaagatcaaggctccagcagattcgaggtcggctgt

SEQ ID NO: 41963 - DNA, 201 bp, Homo sapiens
ccaggaagaggatgagtaccgcacagaatgtaccagttcttcccattctagaatctgaaacagatggtatgggagcttatctgtggggtcatccagacacsgggagaatgcagagccctcataaaggccctcagatatgcagccagcagggagccggtggagtccaccagtctgcatatagctttagatttttctgggagt

SEQ ID NO: 41964 - DNA, 201 bp, Homo sapiens
taaagcaatcttttccaggccacttgggcttttgtgtttctgttgttgtacctcttacctgataaaggagagctattcaacctcctcatcttctgttgctyttagaatcagtacattgttcagttgtaaaattaccattgtttagtaatacatacacatacacatcttagtgtactgtggccactgattccagcaaggacc

SEQ ID NO: 41965 - DNA, 201 bp, Homo sapiens
taccttctgcacttcctgccaccttctgcatattcagagcgtcccagccctagaaatgccgacctagtgtaaaaacaaaatgactaaaggggttggaatamtggaatacaaatctactggtttagatcactagtctgcttatgagctgcaactgaacgccttctatcctcatagaaattattttgatattctcaaatgtct

SEQ ID NO: 41966 - DNA, 201 bp, Homo sapiens
taaaacaaaccctgacaaatgaaaactgggcaatgggattttcctcctgtttgttggtagaatattttgagcattcaaacacgtttctagacagcaagttktgatgctagataattaggtagtgtgggtgtggagaactgcacgctcaaaaatggtattaacagaccttcatccttgtgaagtggtttagcacaatgtgca

SEQ ID NO: 41967 - DNA, 201 bp, Homo sapiens
accaatgaggggaaaaccaggaagaggatgagtaccgcacagaatgtaccagttcttcccattctagaatctgaaacagatggtatgggagcttatctgtrgggtcatccagacacggggagaatgcagagccctcataaaggccctcagatatgcagccagcagggagccggtggagtccaccagtctgcatatagcttt

SEQ ID NO: 41968 - DNA, 201 bp, Homo sapiens
tcaagagaagaagtggatcttcctcagtggctgccaccttctaccttctgcacttcctgccaccttctgcatattcagagcgtcccagccctagaaatgcygacctagtgtaaaaacaaaatgactaaaggggttggaataatggaatacaaatctactggtttagatcactagtctgcttatgagctgcaactgaacgcc

SEQ ID NO: 41969 - DNA, 201 bp, Homo sapiens
aagatcaaagacttaacataaaacaaaccctgacaaatgaaaactgggcaatgggattttcctcctgtttgttggtagaatattttgagcattcaaacacrtttctagacagcaagttgtgatgctagataattaggtagtgtgggtgtggagaactgcacgctcaaaaatggtattaacagaccttcatccttgtgaagt

SEQ ID NO: 41970 - DNA, 201 bp, Homo sapiens
cagaaacctcccttgtccctacctttgccacacccccgcagaaggtcatcacaattctgacttcttttccccatagacagatgcctccgttcttgaatttmatatgatgggatcatacagagtgtgctctctctggagaagttttaagattcttttttagggcattcttgggccctgggggtccatggagctggggagagc

SEQ ID NO: 41971 - DNA, 201 bp, Homo sapiens
actgagctagggtttccgatctggttccctttctctcatcccaaagtcagctaagaaagaaatgtactctaggctggcaggtcaagagaagaagtggatcytcctcagtggctgccaccttctaccttctgcacttcctgccaccttctgcatattcagagcgtcccagccctagaaatgccgacctagtgtaaaaacaaa

SEQ ID NO: 41972 - DNA, 201 bp, Homo sapiens
attccttctctggaattagggagtttgagtttcattgagagaacgaaatgtctctcaagtctacatatttgcctggagctgacacttggtttgggaggggmtccgtgggacccggatgctggggacgcactggccttgccccactgtgctagtgcgtcaggccagtgactcacaagcacgggaaggctcgccccaggtcat

SEQ ID NO: 41973 - DNA, 201 bp, Homo sapiens
tcactgagctagggtttccgatctggttccctttctctcatcccaaagtcagctaagaaagaaatgtactctaggctggcaggtcaagagaagaagtggaycttcctcagtggctgccaccttctaccttctgcacttcctgccaccttctgcatattcagagcgtcccagccctagaaatgccgacctagtgtaaaaaca

SEQ ID NO: 41974 - DNA, 201 bp, Homo sapiens
gtagctaagagtgacaactctatgggtgggagattccttctctggaattagggagtttgagtttcattgagagaacgaaatgtctctcaagtctacatatytgcctggagctgacacttggtttgggaggggatccgtgggacccggatgctggggacgcactggccttgccccactgtgctagtgcgtcaggccagtgac

SEQ ID NO: 41975 - DNA, 201 bp, Homo sapiens
ccgcttccactccgagtgggctacacatgtgtggggaaggcaggggaggcggtgtccagcacctggcctgaaggaaaggggccgccaacatttcatctcarcattgcccaaggaggagcccttgctgggggtggccccctctggccaggcgaggtctgtgcctgtcctggcttggagcctgcgtggggcttgcgccctgct

SEQ ID NO: 41976 - DNA, 201 bp, Homo sapiens
cggtgcaggccagggtggcaccagggtgtggaaggagtaggccatggaagatgaaaaccgggaatagctgggagaactccctgcccttcagcacagccggragccgcacagttctccaaagctggaagaaatagtccaacgtcttttttcgtgcctgtctgggtaaaatttgctgttcttcaaagggtgcctgtaaaatag

SEQ ID NO: 41977 - DNA, 201 bp, Homo sapiens
tctagtttacagaaaattctgtggtttctttttgactatttgctgaaatgccaacattattattttaaaaaatatgcctgataggtgatggcactagtgtwacctggatagtttttgaatgaatggagtatgtaaggaaagtttcacatcttttcatatcaactctaatttatcttcatgctctgctctcttactttggat

SEQ ID NO: 41978 - DNA, 201 bp, Homo sapiens
aaggcagaagcccacatggccggtgcaggccagggtggcaccagggtgtggaaggagtaggccatggaagatgaaaaccgggaatagctgggagaactccstgcccttcagcacagccgggagccgcacagttctccaaagctggaagaaatagtccaacgtcttttttcgtgcctgtctgggtaaaatttgctgttcttc

SEQ ID NO: 41979 - DNA, 201 bp, Homo sapiens
tggctgtgaggaaatgccaccaccttaagccactcagcctttggtgcaggtgcgcacagcaggttgggaccctgtagaatggagtggatactctgtaggayactgtttccagaaagctgaaggtgtcattctggctagcgtgtgaattcttacttccctccccggcatgccagaggttttatggggccacagactgatgct

SEQ ID NO: 41980 - DNA, 201 bp, Homo sapiens
ctctcccccaaggaagaatctagagactggtgagaggctaaggtgggagacagctgtcagtgggataaaacagagaggatggaggacgaagaggaatggcrggtagaaaccagatggttggctctactgctcttaagttttcctctccattcagaagtggactttgattctttgatgagaaatctggaaatggagttttgc

SEQ ID NO: 41981 - DNA, 201 bp, Homo sapiens
gtgaaggagtgcctggcacaggcctgctggtgcttcccctgccccacccactcaccctagtcttgggcatggggccttggggctgtcttgcgtgggctggscttgggagtcagatgttgaaagtgaaggcagaagcccacatggccggtgcaggccagggtggcaccagggtgtggaaggagtaggccatggaagatgaaa

SEQ ID NO: 41982 - DNA, 201 bp, Homo sapiens
ccatctctactaaaaacacaaaaaattagctgggtgtggtggcggatgcctgtattaccagctacttgggatgctgaggaaggagaatcacttgaactggrgaggtggaggttgcagtgtgccaagatcacgccattgcactccagcctgggcaacaaaagcaacactttgtcttaaaaaaaaaaaagtgaactacaagaa

SEQ ID NO: 41983 - DNA, 201 bp, Homo sapiens
ccttgtattcactacctctcccccaaggaagaatctagagactggtgagaggctaaggtgggagacagctgtcagtgggataaaacagagaggatggaggrcgaagaggaatggcaggtagaaaccagatggttggctctactgctcttaagttttcctctccattcagaagtggactttgattctttgatgagaaatctg

SEQ ID NO: 41984 - DNA, 201 bp, Homo sapiens
gaacttgtaagatcagagttatcccggaatttgccaattcccagtaaatgaccctacacatacatcggcaccatcattggaagtcctagtcccatcttcayactgtcaggaatgggcaagttgtacatttgacccacagatgaacattatttattatctgattgacaggcttcatagctattttcttctgtaaattattcc

SEQ ID NO: 41985 - DNA, 201 bp, Homo sapiens
atctcagcacactcaatgagccataacacacagggagtcccataaggcagcacaagtcgcctctccttccccttgtattcactacctctcccccaaggaasaatctagagactggtgagaggctaaggtgggagacagctgtcagtgggataaaacagagaggatggaggacgaagaggaatggcaggtagaaaccagatg

SEQ ID NO: 41986 - DNA, 201 bp, Homo sapiens
ctgcaaacttacaaattactggacatcggagacctcagtgttgcatacaaagggtctgaactagtggctggccagcttcatagcccatcagagcttccagrgcggggcccagacagtgggcaggtgtccttcagtgacagatcctgtgggatcttgaaaagtgggcctgccttatagacccctggggtctgcatttctaat

SEQ ID NO: 41987 - DNA, 201 bp, Homo sapiens
catgtgacatggagttgcttggctttgtggcagtgaggaggacagaccctatctgtgcagcagcctcacagaagatgtgattcgggtgtgtgccactgcaracttacaaattactggacatcggagacctcagtgttgcatacaaagggtctgaactagtggctggccagcttcatagcccatcagagcttccagagcggg

SEQ ID NO: 41988 - DNA, 201 bp, Homo sapiens
cagtgcctccttcacctgaggccgtgacccatgtgacatggagttgcttggctttgtggcagtgaggaggacagaccctatctgtgcagcagcctcacagragatgtgattcgggtgtgtgccactgcaaacttacaaattactggacatcggagacctcagtgttgcatacaaagggtctgaactagtggctggccagct

SEQ ID NO: 41989 - DNA, 201 bp, Homo sapiens
gcatccctgttcaggagggccaggcgctgaggcctcgtcacactcacaactccctcacattccaccattgcctcacacagtgcctccttcacctgaggccrtgacccatgtgacatggagttgcttggctttgtggcagtgaggaggacagaccctatctgtgcagcagcctcacagaagatgtgattcgggtgtgtgcca

SEQ ID NO: 41990 - DNA, 201 bp, Homo sapiens
agtcccgtaagtgtttctctgtggtttttacaagcaggctcactgttcctaccactggcctctgacggttactgcttctctcttcggtttcagggttttcytggtgaacccgggtacccaggactcataggccgccagggcccgcaggtaaacgctggcactattgtgagcctttatcttcactttccaattcaacccaga

SEQ ID NO: 41991 - DNA, 201 bp, Homo sapiens
gaagagatggccatccgggtcttcctggccccaagggctcgccggtatgtttatctccagactttgaatgtgcattttacagtgtggatctgcaaagcatygagaaatgagtaatttgaatcatattgatgtatttctatctccttgatgatggcacaaatgaacttgtttcatgattcatggttcatggaacaacttaag

SEQ ID NO: 41992 - DNA, 201 bp, Homo sapiens
caatgaaattgtgaacctgggtaacctgcattatttatgtaccccttttaaacacagtaatttacaacagtgaattaagacttgcattacctgacttttattttaattcaccatttgaagcttatacattacacctgagtgaagggggtactcaggtcatcctttgtattttttttttctttttagcagtgaaccattgaa

SEQ ID NO: 41993 - DNA, 201 bp, Homo sapiens
cggtggggctgaggcagcaggcagagctgaggacagcgattgttctttgagtctgtctgttactgaagctgcacaatgaaccacacatcaatcagaacctyctgacaggtgctgtgtgttcctatgaatgttgagcagttgttagggtaagaaaactcctggaggagagctgggtgcccaaagccacactataactccctc

SEQ ID NO: 41994 - DNA, 201 bp, Homo sapiens
gggttatcgggtcctccataaataataaccaaaccaacctgcgtttctgcagcaacttgcttgcaagcaaatgcgggtcattgctattttcttctctgatrtgtaggacaaattggaccaattggtgagaagggatcccgaggagaccctgggaccccaggagtgcctggaaaggacgggcaggcaggacagcctgggcag

SEQ ID NO: 41995 - DNA, 201 bp, Homo sapiens
aatgggacaattgttggaaacattttctgtttttcttgtgaaacccaagtctcaggatgctggaggagaagccattggtgggtatgggtgttctttgcagwtttaactttccaggaactgagcaacgttctagtgtgagtctcttgggaaagtcaatttgactctgctgactcaacataactcattttagagctggcccag

SEQ ID NO: 41996 - DNA, 201 bp, Homo sapiens
acttacatagagccctcatttaccttgcttgtgtttcataggagagacaacatattaagctatctgaatcagagctttggtgttatatccgttattatatrtatatacatatatatatatttgagacagagtctcactctgttgcccaggctggagtgcaatggtgtgatctcggctcactgcaacctccgcctcctgggt

SEQ ID NO: 41997 - DNA, 201 bp, Homo sapiens
tttcgccatgttggccaggctggtctcgaactcctgacctcaggtgatccacccacctcggcctcccaaagtgctgggattacaggcatgagccaccgcgygcagtctattatttattaaatactaacgtttacatctttattctacagggcaaacccggaaaagatggtgacaaaggggaaaaagggagtcccgtaagtg

SEQ ID NO: 41998 - DNA, 201 bp, Homo sapiens
gggggaggtgcaaggagtcgcagggaggggcctttgctccgaggggaggagtcctaccggtgttagagccgtcacttcctgctgaaaactggaaggaggtraggagggaatttcttttccccctgcttttcacatttcttaggtctacttgtccctcaggtagaccttgatcaacacacttgtcatcacagaccttctgtt

SEQ ID NO: 41999 - DNA, 201 bp, Homo sapiens
gtgtttgctttttatccgtgaggaagactcgcagtccacctgaacacagccagggtgggttgggagttgggggagcgcccagggggaggtgcaaggagtcrcagggaggggcctttgctccgaggggaggagtcctaccggtgttagagccgtcacttcctgctgaaaactggaaggaggtgaggagggaatttcttttcc

SEQ ID NO: 42000 - DNA, 201 bp, Homo sapiens
ttggttgggaagatgggacgctaaggctgtgcaagctgcatgggcactgccaccaatggtgcccgctgaaacccaccctccaggtgtttgctttttatccrtgaggaagactcgcagtccacctgaacacagccagggtgggttgggagttgggggagcgcccagggggaggtgcaaggagtcgcagggaggggcctttgc

SEQ ID NO: 42001 - DNA, 201 bp, Homo sapiens
cctccacatcacctgccttttccaaaccaatctgccaaacagcaagaaaccagggagaactcagaacgaggtgcccaaacacacacccccttatgaatatscagctgcttctgcaaagtctgtactcgactttgtgggaagcaactcctggctgtccgagaaaacgttctcatctgcagtgagactttatgcttggctcct

SEQ ID NO: 42002 - DNA, 201 bp, Homo sapiens
gggggaacagggctgttgatcctctctccccacagctgtagggctccttggccatccagagccaattagcttcgagattagaaaacagatgtctttgatcygccagagctgtgtgtaactgtggtaatcataaaagcctggtgcccagggtgtgtgtcaccaacagcaggcatttcctagggtcgttcagttggcgtttcc

SEQ ID NO: 42003 - DNA, 201 bp, Homo sapiens
ggtctcttgattccacaatcaacaaatcaagtgctgtctttgtgcttgtgacatctgcagatttccagagctgtcgaagggaattagcttttcttttggcragaaactaccatcagagaaaccaactggagtactcacaaatataccctagcagatggggaagaaggcttctggggagggggaacagggctgttgatcctc

SEQ ID NO: 42004 - DNA, 201 bp, Homo sapiens
gtgggctccctcgtcgttctcctctcccacgacttgcttattttcagggccagcgggagggggctgtggcgctaggccttgcacacagcaggtgctaatartttattatctgactgcgattcccagtagacatggagcacgcctgttcttccctagaaaatcccggaatgagaagaggagaggctaggaatgccttgtgtg

SEQ ID NO: 42005 - DNA, 201 bp, Homo sapiens
gtcggcagacgcctgtgaatggatttagaggtcctacagcgcgatgacgatttcattccatggtggttttagttgtctgctgtttttggagtgaatcacgygccaagctctatgctgagcattgacaacacatggtcaaaaccacagacgtggtccctgccctcctgcacagcctgttcagaggttttccagagaacctgt

SEQ ID NO: 42006 - DNA, 201 bp, Homo sapiens
ccccaggcctgccaggtgaggcctgagaaactcgtgatgcagcatgaagttgtaaacggaggttagggcaggcacctcgggtgcacacagaggcctggggytcgcataggccagggcgcacacttggctttgattcttccaggaattggggcaggacctgggcaagccttcagccttttgtgcctccctttcctcatgtat

SEQ ID NO: 42007 - DNA, 201 bp, Homo sapiens
gtcctgctggtcccattggtgacaaaggacaagcaggctttcctggaggccctggatccccaggcctgccaggtgaggcctgagaaactcgtgatgcagcrtgaagttgtaaacggaggttagggcaggcacctcgggtgcacacagaggcctggggttcgcataggccagggcgcacacttggctttgattcttccagga

SEQ ID NO: 42008 - DNA, 201 bp, Homo sapiens
gcccacgttttattgtaatttcacctttccttatccagcttgctcacacactcagctctgtattcttagcactggggggtgcctggcccatgcaggcgtgyagtagatgggaagtgaatctcaccacctgttaagaaaaagataagtatgactgggcactgccaggagctgtgaaggagtgcctggcacaggcctgctggt

SEQ ID NO: 42009 - DNA, 201 bp, Homo sapiens
acccctttcccagcggcggcattcaggaaatggtcctgcagatgtctcttctgatgtctcttctgatggtggttgggctcaaggagttggccttgtggaayttcggaaagagttctgcagtcacccactgactgtgacccatccttgacatcatttccctttcactggatacttggtgagctctggcttcaaatgtgaggg

SEQ ID NO: 42010 - DNA, 201 bp, Homo sapiens
tttaaaagttaatttttatgttagaagtgaactacaggctgggcacagtgtctcatgcctataatcccagcactttgggaggctgaggcgggtggatcacrtgaggtcaggagttcgagaccagcctggtcaacatgatgaaaccccatctctactaaaaacacaaaaaattagctgggtgtggtggcggatgcctgtatt

SEQ ID NO: 42011 - DNA, 201 bp, Homo sapiens
cactggaagagattagtgatgtcgctattctgggggagaagatgagcacaaaatcagcaatgatttaaaatatttaattgtttaaggaaaaaaagtggtcmtactgccaccactggttttactaaactctgtttttgagttgcatgtccgtcatgcttgaaatatttcactagtcacttaggcttttcatgtttcctttta

SEQ ID NO: 42012 - DNA, 201 bp, Homo sapiens
ctcgtaaatggaaatctcgaggcgctagatgacagaaagcagcagcagggccatcgtggtcccgaacgcagcttgccctgcacctctcagccactgctgcrgactccagccagtctggaatggtgcctagaatgcttggactgcaaaggcgacgggggtcctgtcctgcccagtaacctttcactacctcttaaagttttt

SEQ ID NO: 42013 - DNA, 201 bp, Homo sapiens
ggatgcctctgagtggtcaccaaaacccagattatgaagcaaatctgtgcacatggattgatttaaaatgttaggaggttatgagagtgtaggctgaaaaytgcctaaaatgtgagtcagagaaaaacacagacctatcatctctggagtttttttggactgttgtcagctgtccccatttccaaaatataaaattgagaa

SEQ ID NO: 42014 - DNA, 201 bp, Homo sapiens
tgtcgcttggggcccaggacaactcttgaacatcttaaacattatataggtgtcttgtctctagccggagatttcatggggaggaggctgaaatgttaggyaagattttaaaacagttaggtatgatttaatagataagaagaacatgagatatacagcgtgatttgtagaataaaaatcttcacataaaatttgtctaat

SEQ ID NO: 42015 - DNA, 201 bp, Homo sapiens
ggaagaacatcaagaagtggctaaatgacaacagtggttttgatgaattctatgatatttgttataataattgttccccaaattgaagaaggattaacctyattaaaatgtctcacaaggaggtttggtattttgagttcttgggctagagtcagctcaagcaacaatagaatgcctaaaataatgttagagcattgttct

SEQ ID NO: 42016 - DNA, 201 bp, Homo sapiens
gaaacgtgataagcctgacaatagagacatgcagtcagcaattcgcaggagccaggtagggagcaggtgaccctcacctggggattagacacatggtagtrctggctgagttaggtacctctggtgaggtctctcagtactggtatttgtccattttggaagaacctcctggagcacaggttacagattttggcctcatct

SEQ ID NO: 42017 - DNA, 201 bp, Homo sapiens
tgagtgcgtggttagatcctatcccacaggaaagaatatctatttgctatccttgttgctgaaagtatcggatagacccccccgccgccggtctggggcaygaatagagtgtagctgggttaaagtggatgcaaacccctcaccccatggccgacctccgcatttccagttgcacctgtaaatacaccagggcttcaaccc

SEQ ID NO: 42018 - DNA, 201 bp, Homo sapiens
agcactcagggtgtaccggggagacacagaagtaaacaacgagaaacgtgataagcctgacaatagagacatgcagtcagcaattcgcaggagccaggtasggagcaggtgaccctcacctggggattagacacatggtagtactggctgagttaggtacctctggtgaggtctctcagtactggtatttgtccattttgg

SEQ ID NO: 42019 - DNA, 201 bp, Homo sapiens
gagtatctgggactacaggcgtgcgccaccacgcctggctaatttttgtatttttttagtagagacgggattttaccatattggccaggctggtctcgaaytcctgagctcatgcgatctgcccgccttggcctcccaaagtgctgggattacaggcatgagccactgcgccggcttaaattttattttcttgagtgctgc

SEQ ID NO: 42020 - DNA, 201 bp, Homo sapiens
cactggatttccatctacagttgttacttaaggttgcttagatgggtaacaccagtaacagcaccaagaatacaaccataattgggtactgatttcatcarttctaagatgtgcatttattgatgttttaacaactctggaattgggatagatctaacaattgataatgtgtcattgtttaattagtacccttcttgattt

SEQ ID NO: 42021 - DNA, 201 bp, Homo sapiens
atcatgttgatgggcatgaagacagcacattatactttatatatatacacacacacatacatatatacgtataattatacgtatatataatacatacataygtataattatacatatatacgtataattatacgtatatataatacatacatatgtataattatatgtatatgtaatacatacatacgtataattatacgt

SEQ ID NO: 42022 - DNA, 201 bp, Homo sapiens
gtgttggctctgaaaaaatgctggcctacttttttcttttttaaataatagtaaacattcagctgtttaattttaggttttcctttatttacaatgaggarttcatttttacttggccctaatgttgatagcctaaacttacatttctttaaagtttatttgagagccctaataagtgtttgtaagaaatgatctataaaa

SEQ ID NO: 42023 - DNA, 201 bp, Homo sapiens
catggcgaaatcccatctctactaaaaatacaaaaaaattatcctggcgtggtggcccgtgcctgtagtcccagccactcgggaggctgaggcaggagaaycgcttgaatccagatggcagaggttgcggtgagccgacgtcgcgccagtgcactccagcctgcgccacagagcgagaccccagcaggacgtgatgaaggt

SEQ ID NO: 42024 - DNA, 201 bp, Homo sapiens
ggcaaacagggttctgagagctgaaaatacacattttatgaggtctgcaactccttaaagtctatgtctttccctcccatgaagaaggaccagagtctgcrgtcctttgacctcagaaataattaacctggactcctgaggggtgggtgtggaatgcctcctccccgttcagccttcattcctggctgggaggggttgggg

SEQ ID NO: 42025 - DNA, 201 bp, Homo sapiens
tacaaatcagataatattatccttagaaggtgatgttttcaagagtgatttctttgggttttgggaactgtgcagcagcatttcagaatctatcttttatragtagtataaattcttccatttatttttgaaaagtggctttgcaagtgagtgcagttatgaaaactacactttagtttcattctggctggctgggattag

SEQ ID NO: 42026 - DNA, 201 bp, Homo sapiens
tcccaggctcacgcgctgtgaagcctggtgaaagcacatgtgtcgtctctcctgggttcacagcctgagctgtgcgctatgaatgcgactgcacacagctktagtttagggtgcctcaggctcaacactgtgtgagacttgtttttgactactttaatacttttctttatttagaatgtaccccacaccttttctggcttt

SEQ ID NO: 42027 - DNA, 201 bp, Homo sapiens
ctcacatttgctcatggccttggaaggatgtcgcatggaagtctcccagatggatctctgaccacttgtcaaatgcagagaaggtttgccgcaggatctcytccacatgttcgttattctgtagggtttgttatgtgcagtttctatttacattatgtttgagttttcaaacctggttttaaagatacaaatcagataata

SEQ ID NO: 42028 - DNA, 201 bp, Homo sapiens
cacacacttcctgatcccaggctcacgcgctgtgaagcctggtgaaagcacatgtgtcgtctctcctgggttcacagcctgagctgtgcgctatgaatgcractgcacacagctgtagtttagggtgcctcaggctcaacactgtgtgagacttgtttttgactactttaatacttttctttatttagaatgtaccccaca

SEQ ID NO: 42029 - DNA, 201 bp, Homo sapiens
ttagttgctgttgtgctcacatttgctcatggccttggaaggatgtcgcatggaagtctcccagatggatctctgaccacttgtcaaatgcagagaaggtytgccgcaggatctcttccacatgttcgttattctgtagggtttgttatgtgcagtttctatttacattatgtttgagttttcaaacctggttttaaagat

SEQ ID NO: 42030 - DNA, 201 bp, Homo sapiens
agttggcagtattgattgaatatatacaagccgtgaacttgtaagatcagagttatcccggaatttgccaattcccagtaaatgaccctacacatacatckgcaccatcattggaagtcctagtcccatcttcatactgtcaggaatgggcaagttgtacatttgacccacagatgaacattatttattatctgattgaca

SEQ ID NO: 42031 - DNA, 201 bp, Homo sapiens
gtccttggttgaccaacttcttcctttgagaagcacatagcatctgtacacacagaagcgtgtgcatgtgagggattcatacatatctaagaaccttctgmaaggaagtttatgaaaaaaaattcacattaagtgaattgtgccagagttaaaattctgccaagtcgacagggagtctgaagatgcctttctcaggcctaa

SEQ ID NO: 42032 - DNA, 201 bp, Homo sapiens
actccattgtattctacgggcagctcccaaacccaagactgctggcagcagaaaggcctccaggaaggcacctagtgacgtagataacaaatccgttttaygtgccacatttcctcataggatgtgcataggatctcctttcctgaaagccaggactggcatgcagctccctggtttggggttgcagccacctgtgtggag

SEQ ID NO: 42033 - DNA, 201 bp, Homo sapiens
ttccatattcttatggagagttttagttgctgttgtgctcacatttgctcatggccttggaaggatgtcgcatggaagtctcccagatggatctctgaccrcttgtcaaatgcagagaaggtttgccgcaggatctcttccacatgttcgttattctgtagggtttgttatgtgcagtttctatttacattatgtttgagt

SEQ ID NO: 42034 - DNA, 201 bp, Homo sapiens
cctccacgaaggccctcctggggcagtgccgcctgggacccttcccacagggcaaggactgctctcctagccccagggcttccctttcccgcaaaagccarctgaaacagaaaacaaggcccctgtttgatacactcattgtagcttattttattctattaccccagttggcagtattgattgaatatatacaagccgtga

SEQ ID NO: 42035 - DNA, 201 bp, Homo sapiens
tcttttcaggctgataggcacagttgaatttctggaccactttttactgaggcagccctgtcttttcgctgggagaagaacttggatctttaagcagtgcrtctgtggtcacacgtgacgcgtgctgggggcagtgggcccgttcattgacagacagggacgtgcgtttgactgcagtttccacccattagcagagagctg

SEQ ID NO: 42036 - DNA, 201 bp, Homo sapiens
ctggccgtggcctccacgaaggccctcctggggcagtgccgcctgggacccttcccacagggcaaggactgctctcctagccccagggcttccctttcccrcaaaagccagctgaaacagaaaacaaggcccctgtttgatacactcattgtagcttattttattctattaccccagttggcagtattgattgaatatata

SEQ ID NO: 42037 - DNA, 201 bp, Homo sapiens
ctcctttttcagggctgcagtctctctcctcttctgtcctggatcacatatgtgttcttgcttttgtggcttcttattcccaagtccaccaaccagtgaastccatgaactggactaagcactcaaccaaagagaaaggggatgggtagttttcacattacagacaaattacaaaagtcaagtcttttcaggctgataggc

SEQ ID NO: 42038 - DNA, 201 bp, Homo sapiens
catctcctctcctttttcagggctgcagtctctctcctcttctgtcctggatcacatatgtgttcttgcttttgtggcttcttattcccaagtccaccaaycagtgaagtccatgaactggactaagcactcaaccaaagagaaaggggatgggtagttttcacattacagacaaattacaaaagtcaagtcttttcaggc

SEQ ID NO: 42039 - DNA, 201 bp, Homo sapiens
agactgcccatgactttgtcattaggtgaagaccctgtaagggagaggggagggccttcagtgctggtgcatgagtgttagggttatgcctgggcagggaygctggataccaagttgttcactgtgtcttttttcttcaaggatcttggggaaggaaatataaactccatctcagtgtgtatccaaatcataaaacaataa

SEQ ID NO: 42040 - DNA, 201 bp, Homo sapiens
taaatctctttgtctttttattcctttaaggggatgccaggggtcggagagaaaggtgaacccggaaaaccaggacccagagtaagtgctttccaaagtcyttttatcataaaacaattctccttccatgcggaaaatcgcagattcacagaaacacaagaacagaaaaggctcgtagggacttctagtttatccctttca

SEQ ID NO: 42041 - DNA, 201 bp, Homo sapiens
caggtgacagctgaacagagactgcccatgactttgtcattaggtgaagaccctgtaagggagaggggagggccttcagtgctggtgcatgagtgttaggrttatgcctgggcagggatgctggataccaagttgttcactgtgtcttttttcttcaaggatcttggggaaggaaatataaactccatctcagtgtgtatc

SEQ ID NO: 42042 - DNA, 201 bp, Homo sapiens
ctccttccatgcggaaaatcgcagattcacagaaacacaagaacagaaaaggctcgtagggacttctagtttatccctttcatgccccgaagggcttttcygagactctcctgagctatatcagttgcaaggcttcccaggcaggcgaggtccttccctgtttaaggatccagcactgaaggtgccaccgccggctgttca

SEQ ID NO: 42043 - DNA, 201 bp, Homo sapiens
gaccccacttgggctttcttgcctcctgtgctttgtggggagaaactcagggaaagacacataagcacataagcaacaagcaaagcaaaagcacctccccyatagttcctacacagcggaagctaacttgttctgctgagctctaaaccaagtcatcaaacaaggtgtgggatctttttaggcattctggttctagctggg

SEQ ID NO: 42044 - DNA, 201 bp, Homo sapiens
acccagagtaagtgctttccaaagtccttttatcataaaacaattctccttccatgcggaaaatcgcagattcacagaaacacaagaacagaaaaggctcrtagggacttctagtttatccctttcatgccccgaagggcttttccgagactctcctgagctatatcagttgcaaggcttcccaggcaggcgaggtccttc

SEQ ID NO: 42045 - DNA, 201 bp, Homo sapiens
cactttgtttaagacgatggtgccagctgcaccaatgtcgaagggctaacgaggagccaggcaggaccagagtcaccaggagcaggtccctagcagtggcygtgggggacccatggtgaccccacttgggctttcttgcctcctgtgctttgtggggagaaactcagggaaagacacataagcacataagcaacaagcaaa

SEQ ID NO: 42046 - DNA, 201 bp, Homo sapiens
ttagtataccctaggctcacagggatgagagatgtgggttctttcagtgaagtaatttaggggctgctctttgaagcataaacatggagtccactttgttyaagacgatggtgccagctgcaccaatgtcgaagggctaacgaggagccaggcaggaccagagtcaccaggagcaggtccctagcagtggctgtgggggac

SEQ ID NO: 42047 - DNA, 201 bp, Homo sapiens
acagttacatgtctctcaatattcttgagcatacatttctagagtcaaggaattagtataccctaggctcacagggatgagagatgtgggttctttcagtraagtaatttaggggctgctctttgaagcataaacatggagtccactttgtttaagacgatggtgccagctgcaccaatgtcgaagggctaacgaggagcc

SEQ ID NO: 42048 - DNA, 201 bp, Homo sapiens
atacaggggcacgcaagtccggaggtgtcttgcaggtgttcagattccatggttattcctgagctagtggccacccatagaagaagtgaaattctcctcckgggtttagatacttgttgtatcatcttcctattgaaatttgattttctgcagaggcaaggatgattagaacagaatagagtataattacattttaaaaat

SEQ ID NO: 42049 - DNA, 201 bp, Homo sapiens
ctctggagtgctttcatgttgaaaaccacagtcctcacctgacagttcccacctttggatcaatgtctggactcttacaagtatagttactcttctctgcrtgttcttgcatttggtagttagtgttttccttaaaatgccagcattattgaatttattctagcttattcagtacgctagaatttatggaagtgctctgtg

SEQ ID NO: 42050 - DNA, 201 bp, Homo sapiens
agagttttcagcttctttacatgaatgtcgatatttgcaactttctattttctttcttcatcctctagggtgatccaggtgagatacttggccatgtgccygggatgctgttgaaaggtgaaagaggatttcccggaatcccagggactccagtaagcatttgctgaatcattatgaacatgtgccacctcaccctcccag

SEQ ID NO: 42051 - DNA, 201 bp, Homo sapiens
gaaaatctgtctcaacaaaacaaaacaagcaaaaaacaaaacaaaacaaaaaacaaaaacaaatgtagtcactgtaatggaggaactgcattttttgtgttatttaatttaactttccaagtcatattgaacagtgcagagagttgctgccgactctctccatacttctggaagcctgcttgatgggattgggccaggagt

SEQ ID NO: 42052 - DNA, 201 bp, Homo sapiens
ggtcataaggggcattagagtgcggggccagctcagaccactggtagtcgtccatgagaagcttctgccatgacaggagcgtgctacgtcagtgccatctsatctggcagctgctggccagtggtggctgttgagtctttgaaatgcagtcactgctgggtacggtggctcacgcctgaaatcccagcactttgggaggcc

SEQ ID NO: 42053 - DNA, 201 bp, Homo sapiens
acatgtgcgtcgggtcacctattccctttctgagtccgtcttgggcattttagttattactctctttggattatccaagcaatcatccacttcctatacaratttttatgcttttgagtcttaagaaaaggttttgagaagtgtctcatgaatgctgtgttgctgtctttttccctctctctcacgaaaggtttcccaggg

SEQ ID NO: 42054 - DNA, 201 bp, Homo sapiens
gtttgctttggtgtgttggcatctttcctgtgaaagggatttcactccatagaaggcctgattttcggcagccaatcctaaagcataatcagaagaatgtygggccccacttccaggatttgtccacattgctgggaatgatcaagatggcctcataaagatttcctaataaaagacagcagcataacagttccctccatg

SEQ ID NO: 42055 - DNA, 201 bp, Homo sapiens
cagagagctgtctggaggagccattgccactgagcaaacctaagtttggatgtaatatgttagtgacagccttgcctttttctgttctctcagtgcactgyggagacttctggtcacatgttacacgtaagcacctttgtgttttcttttttaggtcaaaaaggagagagttgcctcatctgtgatatagacggatatcgg

SEQ ID NO: 42056 - DNA, 201 bp, Homo sapiens
attgtgtgaaacatgggaaatgaagataaaatattgcagtcctggagacactcaatccagaggctccttttctctgtgtgtctgagagaaggttgtgagcyctgaccaaggggcctttgggttccagattcattcagcggggaagggagtgcctgggaggcagagatctagcagtggtgacaagactcaacagatcctgct

SEQ ID NO: 42057 - DNA, 201 bp, Homo sapiens
gtgcaggtggcctctgcttgccacccaagattttggcccagtcttttcataaactttgaaatatagtgactctgaaatgtatgcagttgtaatttttaggygtacccggcagttaggatgcccgaggagggagactcttgatggttgtcttattctggggttacctaaaatgccttcttttttctcaagctctattaggta

SEQ ID NO: 42058 - DNA, 201 bp, Homo sapiens
ctgtgcttgggcacagggcggggacctcgggcatctggatgttgggatcagccttgtcaaagggaggcttacaggtctcagcagctgcagtagagataacygcttacctggatgaaggtgagagtccctgtgctcgctcctgtgattcagaacacgtaggaaatagatcctcataatagccctgtgtgttagcatgctcca

SEQ ID NO: 42059 - DNA, 201 bp, Homo sapiens
ggctgatgtgtctgccacacacagtgcgtatgaatgatgctctgctgtctccccagggggagagagggccgctcgggcctcctggcttgcctggtttcgcwggaaatcccgtgagtagaggttatttagggcagaacttctttcttttagttatgacttctctcttttcattccatttccttttctttctttctttgctta

SEQ ID NO: 42060 - DNA, 201 bp, Homo sapiens
gcatttaagcacgaaagttattacctataatcatttactacatcacgtaagaaaatgccattatgggcctttgtccctattaatgatactatcaagtctayttcttctttcataaagtggtacccagtagcacagcttgtgacaaactgtttttaggaaatgattttaaccaacaaatgaagggtagggcagagtgatgca

SEQ ID NO: 42061 - DNA, 201 bp, Homo sapiens
tcactgtgccagttagcctagcactgccctgtctgtttccccgagtcagcatctggtctccgcgacgtatactgaggccccacattgccctgcctttcttygggctgctgttcttttgctagatgagttttgagttttaaggttttcttacccccatccagctccgtggccacatttctgctagcgtgactccagggctgg

SEQ ID NO: 42062 - DNA, 201 bp, Homo sapiens
actgttcaaataccagtgtatgtcattgagagaccatggctttgaccagcaaaagttcaacttttctctgtggtatacctcagtttttcttctttaaccayaaatgtacttgtgcttttaggtaggtcctttggaagtagcacttacggtttgcagagtagcatttttggtttaccagccgttatcttccatattcttatg

SEQ ID NO: 42063 - DNA, 201 bp, Homo sapiens
aagtatgcaaataaacgctggcatgctttccacttgagattcatcaattgcttacattttgccacattcgtggttttactgcctctccatattactcttgwtttttgctgtgccatttgagattaagttgtaaaggtcatctcccttagcccctgaacatgtcagcgttagacccaaggacaaggattttcttttacgtaa

SEQ ID NO: 42064 - DNA, 201 bp, Homo sapiens
cgttaatgtgcccctactgggtatggtaggatgaacacaggtcagtttcaggtagatgaactttcctgttatttctctgaagaaggtcgcagccttcacarcagcttcacagtcttgccaggtgatctgcagtgacatctggctgatgcagaccaagtatttcaaactcaaaccaacaagcagctgtttgtgttggagtgg

SEQ ID NO: 42065 - DNA, 201 bp, Homo sapiens
tctcattaccctgattaaacattttttcgattaaaaattaaatttctagaaaagtgtcaggaagtatgcaaataaacgctggcatgctttccacttgagaktcatcaattgcttacattttgccacattcgtggttttactgcctctccatattactcttgatttttgctgtgccatttgagattaagttgtaaaggtcat

SEQ ID NO: 42066 - DNA, 201 bp, Homo sapiens
cttttcttacccatttgcatcagaaccttgggtcctttatggcaaattacttgcttctaccattgttttgatcatttgaataattctcctcttaattagaygtagatttagattctccttccttgtagtctgattagaaaactttaagaggaaggttgcactgttatgcactaaaaacaatatttatcaaggaaatcgtta

SEQ ID NO: 42067 - DNA, 201 bp, Homo sapiens
taagcctcagcaccttccagtgtacaaaggggccatgaaacgaccctacaatgattaaccctacaatggttgttgtgagaacaagtgagataatacaatayaagcctaaaacagcaagagaaactagaaactgatagctcttccttttatctccttttcttacccatttgcatcagaaccttgggtcctttatggcaaatt

SEQ ID NO: 42068 - DNA, 201 bp, Homo sapiens
aatattgcaaattttatcatagctattatctactccatgttaattttcagttgtttccagctatagatcagttttctttgtctaagtgcttcttacactcrtgtcactgaaaacctgaagagtacagagcccagcccctgttttgggtgcttggataaggggagcttactggtggataaggaaaactccagagactgagag

SEQ ID NO: 42069 - DNA, 201 bp, Homo sapiens
tatcctgatgcctgctttccaacctgccttgaattttcattgacttaaagttgagctacatacgacgtattagagaagaaaaccatggacttctatcccawtataataattagctgatgatattgtcattattcataccactgctgtctcctcattaggtattgtgttcattgggaacagggccttaatatttgcccctgt

SEQ ID NO: 42070 - DNA, 201 bp, Homo sapiens
gtgtcattcccacatggggtcatggacaaggcacccgggtttggagaggtagagccccttggcaagccatgcagccaatggccagcagagcacagtggcayggccagcattttaactgaggcttgaagctcaaaagcattttccctgccacaccaccctgaagtcatctgcagaagccaaatgaccaagtttttctggcac

SEQ ID NO: 42071 - DNA, 201 bp, Homo sapiens
cctgaccaggaggaattgagaggtgtagggagttagtgacttgctcaaagacacaccaaaggcaaggaatgcggccagatccaagttcagaccagcctccygagggctgtgtgctttgatttgatcacctgtttctctttgaattatacgtgcatcagatcagaacatctaataacactcatgggaaagggggcttcctaa

SEQ ID NO: 42072 - DNA, 201 bp, Homo sapiens
accaaaaggatctgttggtggaatgggcttgccaggtaaactggatttagaagaggattctttagcatgtgtgcgtgtgatactggtagggcatgtctgcwgaatgagatcctcttcagctgagacggacagaatccaggcacgtgtgtctttcacatgaattcacatccccagctctgaatggtctcctgctcagggatg

SEQ ID NO: 42073 - DNA, 201 bp, Homo sapiens
tccagggcatgcaatcgggatgcgccctgtggtcagctggcacctaccctgccggcaagggcctgccgtttgtgttgcgtcttccatcagatgtcacctgygctggacacacgtggagacctagccagcccccagagacccagttccagatgcagcttaacttttatatgcctagtgtgttccaggtgcagcttaattttt

SEQ ID NO: 42074 - DNA, 201 bp, Homo sapiens
gttatgatctcatgagcggatactgtggctatcagtgcacagccaggccactcttggtttcttttcctgacactcctcccattgcatttctgtctaacaayggtgacgaggttggagagagctccaggggtggtgtgcctgccgcatcctttcacatatattgtatatcatttcaactcagcaggatagatgatgctgacc

SEQ ID NO: 42075 - DNA, 201 bp, Homo sapiens
ggcaggtatgtgtttctggtctcgcagtgccagcctcctgctgacatttcaccctgtatgtgaggcttcagaccccttcacccagctgaggaggctaacaygtttccttccttctgcttgagagttttggacctgaaatatgatctttatggtataatcacttcagaatctcatacaaaggcctcttgaggttgatggtgt

SEQ ID NO: 42076 - DNA, 201 bp, Homo sapiens
gacatcagttctctgttctacatgacagggaggttcaattagtacatccctaagctcttgctacctatacaatgttatgatctcatgagcggatactgtgkctatcagtgcacagccaggccactcttggtttcttttcctgacactcctcccattgcatttctgtctaacaacggtgacgaggttggagagagctccagg

SEQ ID NO: 42077 - DNA, 201 bp, Homo sapiens
tcgttaatgtgcccctactgggtatggtaggatgaacacaggtcagtttcaggtagatgaactttcctgttatttctctgaagaaggtcgcagccttcacrgcagcttcacagtcttgccaggtgatctgcagtgacatctggctgatgcagaccaagtatttcaaactcaaaccaacaagcagctgtttgtgttggagtg

SEQ ID NO: 42078 - DNA, 201 bp, Homo sapiens
tatggaattggaagaccccgggcaaagcactgagttgggttccgcagaggagccaaccgtgacagtgggcagatgagatgaagttgggcctgagggtttcrtcatagtcctagattaagggaagatattttacaggaaaaaacatgatttgtagtttgagaaaaatgaaaaggaggtgtgggacgcctctgagctgctgaa

SEQ ID NO: 42079 - DNA, 201 bp, Homo sapiens
tgcactgttatgcactaaaaacaatatttatcaaggaaatcgttaatgtgcccctactgggtatggtaggatgaacacaggtcagtttcaggtagatgaaytttcctgttatttctctgaagaaggtcgcagccttcacagcagcttcacagtcttgccaggtgatctgcagtgacatctggctgatgcagaccaagtatt

SEQ ID NO: 42080 - DNA, 201 bp, Homo sapiens
agaggaagaagcggtggtccgtgccagccaccttgaggagcagcctgggatccggagcatctcatgttccatttcttcttgagttttccatgcatcaggawcctgagatgttggtatttagccctgaaggtggctgtgggtattctctatgcgcttttggactttaacccaaaatacagatagcgtaatttgcagtgtaac

SEQ ID NO: 42081 - DNA, 201 bp, Homo sapiens
agcagatctgtttgcctctgaggattagaaatatgtttttattcttcttcttacagttgaaaatttctgttacaacatctattgtgcagttgctttttcaratccataaatgaaatatccggatcacattgacatgaaacctttcaatggaacaaaataccagcttcttagcttttgtagtttgttttaaaagaatccact

SEQ ID NO: 42082 - DNA, 201 bp, Homo sapiens
tgtactaagatttataatgtatgttaaagaggctacatcttaaagccattgctacctcaggacttatcgatagagcattaaccacacaatgcagccatttktgcatgtaagttctgccactgcattcttgtctcaagtgggtacagccagctctaaaccatctgtggctgcagatacccttgatgagaaggcgttgtaaaa

SEQ ID NO: 42083 - DNA, 201 bp, Homo sapiens
gcttgaaagcagaagcttgagttagggagagaacacccgagggctggccgtggcctccacgaaggccctcctggggcagtgccgcctgggacccttcccasagggcaaggactgctctcctagccccagggcttccctttcccgcaaaagccagctgaaacagaaaacaaggcccctgtttgatacactcattgtagctta

SEQ ID NO: 42084 - DNA, 201 bp, Homo sapiens
tttagaaatgagatttgtactaagatttataatgtatgttaaagaggctacatcttaaagccattgctacctcaggacttatcgatagagcattaaccacrcaatgcagccatttgtgcatgtaagttctgccactgcattcttgtctcaagtgggtacagccagctctaaaccatctgtggctgcagatacccttgatga

SEQ ID NO: 42085 - DNA, 201 bp, Homo sapiens
gttttctacttaatatgtaattggaccagaaagactgagtgaggatgttgagtgtaggtaacggggcagtgcatggagggcggcctctgccctgcaccccrgctgtgctgagtgtctctgctccacttccaggtgtgctgtgtgtgaggcgcctgccatggtgatggccgtgcacagccagaccattcagatcccaccgtg

SEQ ID NO: 42086 - DNA, 201 bp, Homo sapiens
aatttcaaaataaagctggtttaacggagtaaataacacgttaaccacctctgagactcctggcatctaaagttaaaaagcaaaactgttgagttatgtartttttattgaaaacagaatgcattcttcttcatctagagatacaaatgaatactaggacacacacacacacacacacacacacacacacacacacacccc

SEQ ID NO: 42087 - DNA, 201 bp, Homo sapiens
acgagactaactccaattatctgtacaaagagttcaaactcttcttcgtcagtgatgaggtcagacctaggatttatgagtcaaatttaggacttgaccaytagatgagtaaccctgtaagccctgcagagcgggagtccaccgccaggaaattgggagtagcacggtgggcagcggcccctcaccaccggcctctcttct

SEQ ID NO: 42088 - DNA, 201 bp, Homo sapiens
aaagcaatagttaaaatttcaaaataaagctggtttaacggagtaaataacacgttaaccacctctgagactcctggcatctaaagttaaaaagcaaaacwgttgagttatgtaatttttattgaaaacagaatgcattcttcttcatctagagatacaaatgaatactaggacacacacacacacacacacacacacaca

SEQ ID NO: 42089 - DNA, 201 bp, Homo sapiens
tccctggtgaaagaggagaaaaaggtgaccgaggatttcctggtacatctctgccaggaccaagtggaagagatgggctcccgggtcctcctggttccccygggccccctgggcagcctggctacacaagtgagttccctcagaaatggtttaatgtggggtgcaagcagacgccagggtgccgggcagacccaggttggg

SEQ ID NO: 42090 - DNA, 201 bp, Homo sapiens
tacatgtctaaagcagttcccttttcagtgatggtctggttggatttttaccttgaacagagttaggagaatgagtttatgctgtagttgctaagtggccstgaggttactgatgtgagcttctgtctggttgcaggcctccctgtacctgggcaggctggtgcccctggcttccctggtgaaagaggagaaaaaggtgac

SEQ ID NO: 42091 - DNA, 201 bp, Homo sapiens
tagagttgggggtggtcctcgggcagtgtggcagacccctttgctttgccgtctctacattcagtcccggctgcggctcagttgaccaggcagtggttaaygctggccattaagacggcaatcatgatgggagagatggccaggctattgatttccagtgtagacggggtctaaatcccagacttaggctagtcctgtaac

SEQ ID NO: 42092 - DNA, 201 bp, Homo sapiens
acctgccagcttaatttggttttacatgtctaaagcagttcccttttcagtgatggtctggttggatttttaccttgaacagagttaggagaatgagtttrtgctgtagttgctaagtggccctgaggttactgatgtgagcttctgtctggttgcaggcctccctgtacctgggcaggctggtgcccctggcttccctgg

SEQ ID NO: 42093 - DNA, 201 bp, Homo sapiens
attttgctttattggattcattacagggaatctgtttacaacaagtgccatagaagcacattctctttaaaccactttggctgatcgattgtttctgaacrcacttccctaaactctgttacatgaaaagactgtacaagtaacccacaaactcagatctcagactctaacgttcagacacttggcacagcttcttaatgg

SEQ ID NO: 42094 - DNA, 201 bp, Homo sapiens
cggcctcagctctcccaggggcacatggtcttacccttacagagttacagtggccgaacctgacctgatatgttcacacctaatggctactctgacttcaracccttttacagaaccatcttgtgtgtccttagttgtgattttctgctctttcttctagattgccaacccactgaccatccctttgctccaggtccactt

SEQ ID NO: 42095 - DNA, 201 bp, Homo sapiens
tctgtttacaacaagtgccatagaagcacattctctttaaaccactttggctgatcgattgtttctgaacacacttccctaaactctgttacatgaaaagwctgtacaagtaacccacaaactcagatctcagactctaacgttcagacacttggcacagcttcttaatggggaataagcagcggaaggaggcctggtgtg

SEQ ID NO: 42096 - DNA, 201 bp, Homo sapiens
cccacgcctggctcagggcagggccttcgtccactcccactttctctcttttctgtaaaaactctgactctacccttaaaagcatcccttttgtctcttcytaattcttggattctcggaaatgtgtgacttcatgtctcctcacagaagccttgtttactgtctacagccttttatctaacccttagtggtctcttaacc

SEQ ID NO: 42097 - DNA, 201 bp, Homo sapiens
tacatttctttaaagtttatttgagagccctaataagtgtttgtaagaaatgatctataaaataatatgccatttaatgattaaatttacattttcatttratatataattggtgaactgttactatccatacaagaggcaaaatctactttttcattcgtctagaagatagcatcaaattccattttgatgataaaaata

SEQ ID NO: 42098 - DNA, 201 bp, Homo sapiens
atcgtattgcagtcggcgctttcctctttcctctttctgtgattttctacctccctacctttctttatcctttctttcatctgtctgaaaggaagtgaggwcacactccactcattcccagatcacttgaaacatttggagcctaagggagaatggagaaggcagcgagaaggtctctagcagtcaaggccgatcgatgat

SEQ ID NO: 42099 - DNA, 201 bp, Homo sapiens
atggaaaataaaccaaaatcgtattgcagtcggcgctttcctctttcctctttctgtgattttctacctccctacctttctttatcctttctttcatctgkctgaaaggaagtgaggtcacactccactcattcccagatcacttgaaacatttggagcctaagggagaatggagaaggcagcgagaaggtctctagcagt

SEQ ID NO: 42100 - DNA, 201 bp, Homo sapiens
ttctctcttttcattccatttccttttctttctttctttgcttatgttttaataacttatattttatatataatattacatgataacaattttaatgctartgatattttgagaaaaacaaaactaacaccaaaactttcttttttagggaccaccaggcttaccagggatgaaggtacattttattttattttgctttat

SEQ ID NO: 42101 - DNA, 201 bp, Homo sapiens
caaatgaagggtagggcagagtgatgcatgcgatgtcagggctgatgtgtctgccacacacagtgcgtatgaatgatgctctgctgtctccccagggggaragagggccgctcgggcctcctggcttgcctggtttcgctggaaatcccgtgagtagaggttatttagggcagaacttctttcttttagttatgacttctc

SEQ ID NO: 42102 - DNA, 201 bp, Homo sapiens
taaggaaatacagttttcccatatttagtgtaccagaaagatataattgttcctttcttttttgtagacttttatcctaaaattgcatttaagcacgaaasttattacctataatcatttactacatcacgtaagaaaatgccattatgggcctttgtccctattaatgatactatcaagtctatttcttctttcataaag

SEQ ID NO: 42103 - DNA, 201 bp, Homo sapiens
tcctgagctaggattcgtggcgacagagttggaactactccaggcgggttgtgacacgtccgtctccccacatggagaacggtggcttgccagttcccctygcgtcccttcggctggcccggagcttggtgcgtgtggatgctgccgtctgtgagcccattgtgagaccgcacggctgaaacagctgaattggggaatagc

SEQ ID NO: 42104 - DNA, 201 bp, Homo sapiens
ctcactgtgccagttagcctagcactgccctgtctgtttccccgagtcagcatctggtctccgcgacgtatactgaggccccacattgccctgcctttctwcgggctgctgttcttttgctagatgagttttgagttttaaggttttcttacccccatccagctccgtggccacatttctgctagcgtgactccagggctg

SEQ ID NO: 42105 - DNA, 201 bp, Homo sapiens
gggtggatcacctgagatcagaagttcgagaccagcctggccaacatggtgaaaccctgcctctactaaaaatacaaaaattagccagcgtggtggcgcaygcctgtaatcccagctacccgggaggctgaggcaggagaatcccttgactcaggcagtggactttgcagtgagccgagatcgtgcatgcactccagcctg

SEQ ID NO: 42106 - DNA, 201 bp, Homo sapiens
tattaagttcaggaattgtaacattgttgcaattttatatcccatgtccagtgcacgctcactgtgccagttagcctagcactgccctgtctgtttccccragtcagcatctggtctccgcgacgtatactgaggccccacattgccctgcctttcttcgggctgctgttcttttgctagatgagttttgagttttaaggt

SEQ ID NO: 42107 - DNA, 201 bp, Homo sapiens
atgatacctttattaagttcaggaattgtaacattgttgcaattttatatcccatgtccagtgcacgctcactgtgccagttagcctagcactgccctgtstgtttccccgagtcagcatctggtctccgcgacgtatactgaggccccacattgccctgcctttcttcgggctgctgttcttttgctagatgagttttga

SEQ ID NO: 42108 - DNA, 201 bp, Homo sapiens
tcactgtcacaggcctcagggagaaggagccagccttccctgtcaaaccttgggatcagggccctcgtggagtcacgtctgtgcttctggccgactccctkgatgctgctggcctgaaggggcagtgccacagtatggggcttgaggttctttaatccatttactgtttgattcaattctttagggtttgaaacaatctct

SEQ ID NO: 42109 - DNA, 201 bp, Homo sapiens
gacccaaggacaaggattttcttttacgtaagcatgatacctttattaagttcaggaattgtaacattgttgcaattttatatcccatgtccagtgcacgstcactgtgccagttagcctagcactgccctgtctgtttccccgagtcagcatctggtctccgcgacgtatactgaggccccacattgccctgcctttctt

SEQ ID NO: 42110 - DNA, 201 bp, Homo sapiens
ggattttctgccattgtgtcctggggccatcactgcagggtgtatttaaggagctcttcatttgaacaagtcctggtctgggaatgtttttccttcctcaytgtcacaggcctcagggagaaggagccagccttccctgtcaaaccttgggatcagggccctcgtggagtcacgtctgtgcttctggccgactccctggat

SEQ ID NO: 42111 - DNA, 201 bp, Homo sapiens
ctgtccgtttgctctgctctggttcccataataaccttggacagggtacagagtattagattattcgtgtgcacttttatctggacaaaagattaagaacrttaaaaaaatatgtggggaatggcaagaaccatgtccatggaggagtcacttccttcttagctccttcatttcaaagctctggggatacacagattgctt

SEQ ID NO: 42112 - DNA, 201 bp, Homo sapiens
tgttggcaagaaaaggattaggcaaataggaagtgactagtgttaggtactggccttcccggctttcttcttcttttcatttgtagcgaagtgtcaccatygtggaacatccatgtgtgcaatgctgagaagagttccccccctttttttttagaggggacttatgatggaggatggaagaaatgagaattcagagagaca

SEQ ID NO: 42113 - DNA, 201 bp, Homo sapiens
gaaggtaccaagagttcccacgtacctcttctcgggcacacgcatggcctctcccatgatctctacatcccgcaccagagtgggtcattggctacagtgcrtgaacctgcaccgacacgtcactatccccctgtccatagttcatgctggggttcactctcggtgctgtactttgtatgcatttggacaaatagataatga

SEQ ID NO: 42114 - DNA, 201 bp, Homo sapiens
accttgccttgagcacaccatgggaaacagatgatcgagggtcctgttgctccctgactctaactgtgcacattctgccttgagctccagtggaagtgggrggtcactgtggtcacgttagtagcattgccagttgcagctgcaaagtctggcttggaccctgctagctccaataacctttgcacaacatgtccagctctt

SEQ ID NO: 42115 - DNA, 201 bp, Homo sapiens
agaaactgatagctcttccttttatctccttttcttacccatttgcatcagaaccttgggtcctttatggcaaattacttgcttctaccattgttttgatsatttgaataattctcctcttaattagacgtagatttagattctccttccttgtagtctgattagaaaactttaagaggaaggttgcactgttatgcacta

SEQ ID NO: 42116 - DNA, 201 bp, Homo sapiens
agtagttaataaaattcttaaattttgaaataacttcagacttagaaaaaagttccaaagtattcccgtatatctttcatccaaattccccaaatgttaaygtcttacaaaaccacagaacaatgatgaaaatgaggaaaataaaattaagataatactctgatctgatctactgacctttttggaattttgccctttgtc

SEQ ID NO: 42117 - DNA, 201 bp, Homo sapiens
ttgaaaaacagctctgttgaatcacagtatcagtattttcacacgtaagcacattcgggccatttccgtggtttctcatgagctgtgttcacagacctcarcagggcatcgcatggaccgcaggagggcagattcggaccactaggcctgaaatgacatttcactaaaagtctccaaaacatttctaagactactaaggcc

SEQ ID NO: 42118 - DNA, 201 bp, Homo sapiens
tgatggaggatggaagaaatgagaattcagagagacaagcatgggccacctgccacgcccacaggtgatctgcgctacatgcatgtgctcagaagggtttmggggttgctctgtgggttgaggtgtttcttagaaagaagtgtgcaatttcgagagtgtttccacttcaattttgagtccactatatactgtgagatgcag

SEQ ID NO: 42119 - DNA, 201 bp, Homo sapiens
atcttttataggcatttaataaatatttatcaaaaataagcaaatgcacaatacagtagtaatgctgtatttttaaataaaaattcatttttaatttgatsaggccctagatctttttggtctgtcttctgaagtcaggatttttgaaatgtagtgagaaaggaagggaaatgggatcatttagtgctttaaactgcagtg

SEQ ID NO: 42120 - DNA, 201 bp, Homo sapiens
gttagcaatgaatatttgatgctgttcgacatgggcagatgaccgagacgattttcaaaggcagaccttcagtcacaggtttaattttttcatttaccgargaaccatgaaagaaaaaggtcattttccattttttctaggtgagtgtactaaaatgtaattaaagcaactgaaatctccaaacagagcatgtttgaaata

SEQ ID NO: 42121 - DNA, 201 bp, Homo sapiens
tatttgcccctgtttacccctagtacttagcacattttatcttttataggcatttaataaatatttatcaaaaataagcaaatgcacaatacagtagtaaygctgtatttttaaataaaaattcatttttaatttgatcaggccctagatctttttggtctgtcttctgaagtcaggatttttgaaatgtagtgagaaagg

SEQ ID NO: 42122 - DNA, 201 bp, Homo sapiens
agtcgcctctgtctggtgcctccacaccttggagttctctgcatctcgctgcttaagcccctccttcttcctccaaccgtccccttccaaagcatgcctcraagcctggcctgccctgcctggtgacagcaggggtctccagcaccagccagaaccctcccctgctcacagccaaggtagctgggatgagcatcttcctgg

SEQ ID NO: 42123 - DNA, 201 bp, Homo sapiens
atcctacaaaaatttggaaccctcccatgcaacctgtataaaaacgctccgggtgtagaggagcctcagcagaggagatggatttggcggtacaacgagartcagtcttgaaggccaggacgcattccccaggggcctaacaggaggctcatgaacatctgcagtgatttattgaaccagtgctggaaggaaaatgacaaa

SEQ ID NO: 42124 - DNA, 201 bp, Homo sapiens
ttcaaaaacttctagaatatggtgcaggccaaacagggtacatctgtggcccgaatctggcctgcgggtcaccagtttgcaatctctgttccaaagttaargcacccggtatctttatactgcagagttttgaactgtgttgtatggattacgtagcagtcgtggaattaaaactggtcacaacagcaggagagcaggttc

SEQ ID NO: 42125 - DNA, 201 bp, Homo sapiens
ggattattatattaattagcttaaaaaccttgataaaaagatgttctgaaaagatgactcatcctatcagaggtttcaggcaaagacaaattggggaaaawaaagaatggcttagacagaacatgtcagcagccagtttttaaatgacatgtttgccatgtgatatttcacagaaatggctacacagaaatgaaatgtgtt

SEQ ID NO: 42126 - DNA, 201 bp, Homo sapiens
ctacgaagttatcatagtacctttgcaggagggattattatattaattagcttaaaaaccttgataaaaagatgttctgaaaagatgactcatcctatcasaggtttcaggcaaagacaaattggggaaaaaaaagaatggcttagacagaacatgtcagcagccagtttttaaatgacatgtttgccatgtgatatttca

SEQ ID NO: 42127 - DNA, 201 bp, Homo sapiens
ttatatttgtttcctttccagctggtctaagttcttgcagagcccccttttttcctttattgggaacagacgacaccccacacagcccacgcctggctcarggcagggccttcgtccactcccactttctctcttttctgtaaaaactctgactctacccttaaaagcatcccttttgtctcttcttaattcttggattct

SEQ ID NO: 42128 - DNA, 201 bp, Homo sapiens
ataaaatattgcagtcctggagacactcaatccagaggctccttttctctgtgtgtctgagagaaggttgtgagctctgaccaaggggcctttgggttccrgattcattcagcggggaagggagtgcctgggaggcagagatctagcagtggtgacaagactcaacagatcctgctgtcctggagcaagtattccatgggg

SEQ ID NO: 42129 - DNA, 201 bp, Homo sapiens
aacgtatgtacttctcagtgaagggggctggaaataagaaactagagttccatttgggatcattttgaaaggggagaaaaggctggggtaaataggaaagrattttttagaaactttcatcaaaggcaataatgctagcatgggttacttaataattataaaagatgatatgggaattaagggaaatgaagccaagtggag

SEQ ID NO: 42130 - DNA, 201 bp, Homo sapiens
ctgctctttaaaaatggagttctcttatattgtaactgtttcataattattcatcatatacaatattacttattattgtggtattgtcaacttacatagarccctcatttaccttgcttgtgtttcataggagagacaacatattaagctatctgaatcagagctttggtgttatatccgttattatatatatatacatat

SEQ ID NO: 42131 - DNA, 201 bp, Homo sapiens
aaactgcttctaaagcattggttctcatgattgtgggggccggcaaactcaaaacctgcagagtgaggtgggcaggccagacaccagagaaggggtggagytgtagtcttgggtctgaaggtggtgtgtgggcagaattccctcttcctccagggaggtcagtcttttatcctgtaagaccttcaactgatgggatgaggc

SEQ ID NO: 42132 - DNA, 201 bp, Homo sapiens
ttatacataaaattatacagatttatacataaaaagttatacaataatacacacactcccagttccaccagtttttgctcccttgggtgatattgtacccrtcgaaaatgcatgtgttggactgagcgatctcccttgagtgtttatccgcactaatatctgaagtacgttttcaggccccaggagcctccctgataggaa

SEQ ID NO: 42133 - DNA, 201 bp, Homo sapiens
gctgtctccccagggggagagagggccgctcgggcctcctggcttgcctggtttcgctggaaatcccgtgagtagaggttatttagggcagaacttctttyttttagttatgacttctctcttttcattccatttccttttctttctttctttgcttatgttttaataacttatattttatatataatattacatgataac

SEQ ID NO: 42134 - DNA, 201 bp, Homo sapiens
tttttttcttatacaaactcagaagagagctaacctcttattgatattttgttatcaattatttatgttcctgcagtctttcttcttaccccaaatcttttaactaagtcatgacctagaattgtgataaatttcatggaacttcaaaaaaaaagacggttgtgctggtgagcagaggcgtgatttcatgtgcagactctc

SEQ ID NO: 42135 - DNA, 201 bp, Homo sapiens
tggagaaccaggactacctggaacaaaagggacaagagtgagtacagttgctactcacaatcgatgattccatgcgtgggacaggcccgcttccagagccrggcaccttttccctcctttctccttgccctcgtcctccatctcctctcccagctcacacagcacgggcaggcaggcgcgaggcaggcagtgaggagcagc

SEQ ID NO: 42136 - DNA, 201 bp, Homo sapiens
acttgaagtcactctatttaaatcttgcctgactttcttaactagctgttctgatttctgtcctcctctagagacaattgaccagatgccatttctttggscttcctattggataaggccgtgaacccaaagggagggggaaatagatgataatttaggaacatgggagttggtataagcatccgtttcctttcctgtctc

SEQ ID NO: 42137 - DNA, 201 bp, Homo sapiens
ggtgtagaggagcctcagcagaggagatggatttggcggtacaacgagagtcagtcttgaaggccaggacgcattccccaggggcctaacaggaggctcawgaacatctgcagtgatttattgaaccagtgctggaaggaaaatgacaaaatatttgagtcaacaataaaacaattatgcagatgttttacgaagctctgt

SEQ ID NO: 42138 - DNA, 201 bp, Homo sapiens
gtgatcaatgacaatggcatttctattctgttccagggtgatactggagaaccaggactacctggaacaaaagggacaagagtgagtacagttgctactcwcaatcgatgattccatgcgtgggacaggcccgcttccagagccgggcaccttttccctcctttctccttgccctcgtcctccatctcctctcccagctca

SEQ ID NO: 42139 - DNA, 201 bp, Homo sapiens
taaatatcctacaaaaatttggaaccctcccatgcaacctgtataaaaacgctccgggtgtagaggagcctcagcagaggagatggatttggcggtacaaygagagtcagtcttgaaggccaggacgcattccccaggggcctaacaggaggctcatgaacatctgcagtgatttattgaaccagtgctggaaggaaaatg

SEQ ID NO: 42140 - DNA, 201 bp, Homo sapiens
caccttttccctcctttctccttgccctcgtcctccatctcctctcccagctcacacagcacgggcaggcaggcgcgaggcaggcagtgaggagcagcccrtgactccctgagccccagtccttcccatggggactgtgcacaggctgagctccttagtccttggttctgcaaacttgctttcccccatttgttcttcttc

SEQ ID NO: 42141 - DNA, 201 bp, Homo sapiens
ccacagggaccaccaggacaaaaggtaagcacggctgtgggattgggggtgggtggatgtaagattgcccgcattcttgagatagcggtgatcaatgacartggcatttctattctgttccagggtgatactggagaaccaggactacctggaacaaaagggacaagagtgagtacagttgctactcacaatcgatgattc

SEQ ID NO: 42142 - DNA, 201 bp, Homo sapiens
tccgagagatttgagagcagagtgcagaccctgggaagctggaggtgggtcccacacacagctgaggaagaaaagggccttgttgccagtactctggctaygaagttatcatagtacctttgcaggagggattattatattaattagcttaaaaaccttgataaaaagatgttctgaaaagatgactcatcctatcagagg

SEQ ID NO: 42143 - DNA, 201 bp, Homo sapiens
agtaggacattgagagcacctgtggccgactcgaaacacttcatatggaattggaagaccccgggcaaagcactgagttgggttccgcagaggagccaacygtgacagtgggcagatgagatgaagttgggcctgagggtttcatcatagtcctagattaagggaagatattttacaggaaaaaacatgatttgtagtttg

SEQ ID NO: 42144 - DNA, 201 bp, Homo sapiens
tggattttcatggatcagaaaatatctatggttttatttctttgtaaatgtggatctatcagaaatattcactgtgcatctcctttgtaaccatcgccttstagctttggattacatatgacttgagtgttcagctctgtcagtcaacttcatagtgaatgttaaaattcatattagaatacttgagcctagaattgtgcc

SEQ ID NO: 42145 - DNA, 201 bp, Homo sapiens
aacacctagcttcggtggctgattttggcctctgattgctgcagtgtgcaacatgcacaaccatccacaccgtccatagctgcagcaagtgaggttccaakcctgtagcataacacttgttttctgtactgtttttctcgttttgaagatatttttaaaaatatatatttgagaaacagaatgttaggtagtaggtttaga

SEQ ID NO: 42146 - DNA, 201 bp, Homo sapiens
cacccacatacattattaagttcacgttaataacatcctcggctgtctaagtacttaggcactaattggcatttttcaacatttctgttaatgtagaacaygtctttcgaaccctcaggggccttgctttggagctaatgaaaataaagcaaagtgtctttataagaaaaaaaattaggtcaggagcgttggctcacacct

SEQ ID NO: 42147 - DNA, 201 bp, Homo sapiens
cacaagccagttgatggtgtcaaagatgttgttgagttctctggccaaaggatgttctgttttctgaaaaagtttagagctgcagaattgtttttatgctsgagtggctaaaaaaatgggacacatggttggggtgaggagaaaagccatattttactgatccaaaggaattggatcactcctgaagcaaacaaagtataa

SEQ ID NO: 42148 - DNA, 201 bp, Homo sapiens
aggtttaaacctgaagactgtcttgcatgcttttgtattattaactataattcttatcttcagagtatttcatctgcaattttcaagtttacttttatcayagaccaaaaaaagaaaaaaaaaatccatcacctaccttgtggtgtttcctgcctttgctgtgtcctcgttttgttccacaacgctgccccacacccacat

SEQ ID NO: 42149 - DNA, 201 bp, Homo sapiens
gaaggctcctggcctgtggccaccactgtcatacagcgctgttccttgggctggagggagagcttttgccacctcatctcccatcctgtcgacatgtgacrgctttgccagcccagccacagtgactaaagtcttcagggtcatgaaaaataaccccccaaatgccacccactgctgctgtccaagctcaccccaccagca

SEQ ID NO: 42150 - DNA, 201 bp, Homo sapiens
gtattagctacagtcaagggttgcatcttcttttcagatgttcaggagatggtaatctccatcagcatttgccttactgttctgattaggtgaatactaarcccattcgagcctctctttttcatatcatgaggatggagccatgtttctgctcattaaaaaggccttttacaaaaagaagacagctatggggaatatatt

SEQ ID NO: 42151 - DNA, 201 bp, Homo sapiens
aggaaatatgcgtgggattccgcagcacacgtaagagcccatcctatttcttcaccattgtagattcacgtttttggaatgtgcatttccaatggaaaatygatgcttcctggcttcaacattttaataaaaatacttctggctagtgccctagtctttcattttgaaaataactcatgttagaaaattgatctattggtt

SEQ ID NO: 42152 - DNA, 201 bp, Homo sapiens
tctgggcatgtgaagtggacgctagtacttgaagtcactctatttaaatcttgcctgactttcttaactagctgttctgatttctgtcctcctctagagamaattgaccagatgccatttctttgggcttcctattggataaggccgtgaacccaaagggagggggaaatagatgataatttaggaacatgggagttggta

SEQ ID NO: 42153 - DNA, 201 bp, Homo sapiens
ggcatgtagcaatctggaatggtaaaaatcggtgctctccatccatgcccccaggagcgctgcctgattggcactgtctgtacaattctctgttatttccygaaaccctaacatagtcttctgcttatttgagtgaaacatctcctatttgaagagctactgataaggagtgggtgggaagtaaaggagaatgaaaacatt

SEQ ID NO: 42154 - DNA, 201 bp, Homo sapiens
ttacaacagtgaattaagacttgcattacctgacttttattttaattcaccatttgaagcttatacattacacctgagtgaagggggtactcaggtcatcytttgtattttttttttctttttagcagtgaaccattgaactgcagctaaaataccttcatatgccagggtgaaacccagcacgggcccttatatgacaga

SEQ ID NO: 42155 - DNA, 201 bp, Homo sapiens
gaaccagatcattacctttccccctcctgcctcccgctccagatgggggtggcatgtagcaatctggaatggtaaaaatcggtgctctccatccatgcccscaggagcgctgcctgattggcactgtctgtacaattctctgttatttcctgaaaccctaacatagtcttctgcttatttgagtgaaacatctcctatttg

SEQ ID NO: 42156 - DNA, 201 bp, Homo sapiens
taagttcttctgagttattgggagaaaatattattctaaatacgttaacgtatgtacttctcagtgaagggggctggaaataagaaactagagttccattygggatcattttgaaaggggagaaaaggctggggtaaataggaaagaattttttagaaactttcatcaaaggcaataatgctagcatgggttacttaataa

SEQ ID NO: 42157 - DNA, 201 bp, Homo sapiens
gtcctgagggccccccagggctgaaagggcttcagggactgccaggcccgaaaggccagcaaggtgagaaggcttggcctgtgcagggcggtatggggagsccagaggggcagtggtcagagttcctcctcacccatgtatctaaaataagtttctgggtaatgattatacacacacatatgaatatgagtttcttacctc

SEQ ID NO: 42158 - DNA, 201 bp, Homo sapiens
tgagctgctgaaacatctaaggtagcatatatgtacccagcaatcccacccaacattcccacagtctaggcagatggagaaggtgatcctgtcaagaggcrtggctgggagaagagtggccatagtttgcaagtccaaagaatacatagaaaataaaagaggaggaaatgcccatgaagaaatcagttatgaaatcaatca

SEQ ID NO: 42159 - DNA, 201 bp, Homo sapiens
tttgctcatggccttggaaggatgtcgcatggaagtctcccagatggatctctgaccacttgtcaaatgcagagaaggtttgccgcaggatctcttccacrtgttcgttattctgtagggtttgttatgtgcagtttctatttacattatgtttgagttttcaaacctggttttaaagatacaaatcagataatattatcc

SEQ ID NO: 42160 - DNA, 201 bp, Homo sapiens
ttggtaatggatttagaaataaaagtaagctccaaattaaaagaaaattgccaatagaaacagaaaatattcataaggaagggtaagacaggaaaggaatrtcaggaagggagaatcaaagtgaattcagtaatgtgcagacactggagttcacaggacctaaagcaggtgcaacgtggacgctctctggaggtgtctggc

SEQ ID NO: 42161 - DNA, 201 bp, Homo sapiens
tgatagctcatttatttttagtgtgaatattccattgtctggatgtcccacaggttgtttgtttgttcacctagtgaaagacgtggtggttgcccccgagygttggcagttatgaataaagctgctgtaaacatccatgtgcagggtttcgtgtggacataagttttcagctcatttgggtaaatagcaaggagcatgatt

SEQ ID NO: 42162 - DNA, 201 bp, Homo sapiens
tgtgcgtgtgcctatggggcgcccagacaccttggcccttccctttgtattcttgctgttcttagtgagtttacatcatggcttgggcacggctcacattytcatctccctacattagtgacatcaacacatttcacatttggcttattagccacttctattcaatgtcaaaaagcaaatgtatgatttaaaaactagctg

SEQ ID NO: 42163 - DNA, 201 bp, Homo sapiens
accttttccctcctttctccttgccctcgtcctccatctcctctcccagctcacacagcacgggcaggcaggcgcgaggcaggcagtgaggagcagcccgygactccctgagccccagtccttcccatggggactgtgcacaggctgagctccttagtccttggttctgcaaacttgctttcccccatttgttcttcttca

SEQ ID NO: 42164 - DNA, 201 bp, Homo sapiens
tccgtagttttgcattttccagactctcttatagttgtcttatagttggaatcgtatggtatgtagacttttcagattggtttcattcccttagtaatatrcatttgaggttcctccatgtctgttcacgtcttgatagctcatttatttttagtgtgaatattccattgtctggatgtcccacaggttgtttgtttgttc

SEQ ID NO: 42165 - DNA, 201 bp, Homo sapiens
tattggttacattttaaacatgaaaagatccaaacactgctcagagtgttctttccctgaaagcctcagcccagactgacggccatcccctgtgctgctgwgggcatgtgcctcgctacagaaagggccattgccttgtaatggaattattctgacatagcctttagaccacaccatcagctttcccaagggcagggacgg

SEQ ID NO: 42166 - DNA, 201 bp, Homo sapiens
atgtcaatggcacccatcacgggggaaaacataagaccatttattagtaggtgagtcgagcatctgtaggaacaaatgcaaaattgaagaggaaaagtctytagtctggacaagcatatgttttctatttttctccaaaacgttgaatccattgccatttagcttattatttgtgatattcgagttttgtaatggaaatct

SEQ ID NO: 42167 - DNA, 201 bp, Homo sapiens
gtagttccttcattttcctctccattagacatgctgcccctcattcaccactcaggaagggcacacagtattttgtggaagcccacaggggccgcccctcrgggctcttggctgccttggagcacgttgtgcttgtggcttttctccccagtgacaggctggatgtctcaggctctgtgcccctttggtcagcgctcttcc

SEQ ID NO: 42168 - DNA, 201 bp, Homo sapiens
gacaaatagataatgacatctatccatcattatagtataacatagagttgttttactgcccacaaaattcctccatcctctgcctattcatccctaccccsttacctctgacccctggcaaactatggatcctcttgctgtctccgtagttttgcattttccagactctcttatagttgtcttatagttggaatcgtatgg

SEQ ID NO: 42169 - DNA, 201 bp, Homo sapiens
agctggcggtctcactgcctcagccccattttcctgggaactgttcctcctcttccaggaatggatttcttggcatgatacttctgcctctctcccccacrcaatctgaatgccacacaaggctctggaccctgaggctcctgtctgggcctgaccggacagcgggcccctccaggcatggccatctctccctttagcctg

SEQ ID NO: 42170 - DNA, 201 bp, Homo sapiens
ctcattgtagcttattttattctattaccccagttggcagtattgattgaatatatacaagccgtgaacttgtaagatcagagttatcccggaatttgccwattcccagtaaatgaccctacacatacatcggcaccatcattggaagtcctagtcccatcttcatactgtcaggaatgggcaagttgtacatttgaccca

SEQ ID NO: 42171 - DNA, 201 bp, Homo sapiens
gcccgggtagttccttcattttcctctccattagacatgctgcccctcattcaccactcaggaagggcacacagtattttgtggaagcccacaggggccgyccctcggggctcttggctgccttggagcacgttgtgcttgtggcttttctccccagtgacaggctggatgtctcaggctctgtgcccctttggtcagcgc

SEQ ID NO: 42172 - DNA, 201 bp, Homo sapiens
tttctggccagaagtattcatatgtgtctatgtgtgtatgtattttgtgtatgtatatatatgtgtgtgtgtgtgtgtgtgtgtgtgtgttacactcccayatccccactaaatcagttctttctttctttcttgccagtaacccacatctttattggcatcagagtaggaaactattgtaacatttttttacaatccagt

SEQ ID NO: 42173 - DNA, 201 bp, Homo sapiens
cagtgccccacgaagtaacccaccgcctttctggcactccggggtgcctaggatttctctgtccctataggcggctcctctgtatcccagctggcggtctyactgcctcagccccattttcctgggaactgttcctcctcttccaggaatggatttcttggcatgatacttctgcctctctcccccacgcaatctgaatgc

SEQ ID NO: 42174 - DNA, 201 bp, Homo sapiens
caatctcagtgccccacgaagtaacccaccgcctttctggcactccggggtgcctaggatttctctgtccctataggcggctcctctgtatcccagctggyggtctcactgcctcagccccattttcctgggaactgttcctcctcttccaggaatggatttcttggcatgatacttctgcctctctcccccacgcaatct

SEQ ID NO: 42175 - DNA, 201 bp, Homo sapiens
aggaatcacaggctctaagggtgatatggggcctccaggagttccaggatttcaaggtaagacagcacagaccttgctgcacagcctttgcagcagcagaygctgtgtgaagagcttgctaacctcgggcaccttagcactgatagcaccgctgccattatagcacgagatactgttctcttcaaattaaaaatggcactt

SEQ ID NO: 42176 - DNA, 201 bp, Homo sapiens
tatatagccatcacagttggtcaccaattccttcctctgttctttactgctgccttttgcctgactgatgttcctcttctgtagggtgaaagaggcctccyggggttacaaggtgtcattgggtttcctggaatgcaaggacctgaggggccacagggaccaccaggacaaaaggtaagcacggctgtgggattgggggtg

SEQ ID NO: 42177 - DNA, 201 bp, Homo sapiens
atgatccattcaagttcccagtgtgggcgtgctcacgggctttctgcagaaagtcatagttaaacagagcactgtacattgtagatcattctgtaaattcygctaaaagttatttgtgtttcacccaactgcaggccctcctggaataaaaggagagaagggtttccccggattccctggactggacatgccgggccctaa

SEQ ID NO: 42178 - DNA, 201 bp, Homo sapiens
acttcatgcagatcagtctggagggtttcgaggacaggatgtgcttatttttgcattcccagagcccctaccgagtatatttgatatgtatttgttgaacsaacgatgcaaatcttagaggcctagagctcgtggctttccgttgctggggccattcgtgtgcatgggtctcctaggccgggagacgtgccactgctcctg

SEQ ID NO: 42179 - DNA, 201 bp, Homo sapiens
aaccaacgtgtgctctgtggggcccctgaaacacgaatcctctgtggggttgattgagaaaggattcacaggcttcaagtcccagcaagatttatttgctmgaattcaagcaaatctttacgaaagggagttctcatggatgaggccactgttgggggctgggccaggactagatggagccatggattccagcctggcagc

SEQ ID NO: 42180 - DNA, 201 bp, Homo sapiens
acctatggggcttgtggtgagattgaaaagatataataggtatgaggaagctttgcaaacgcttgaaaagggttgagcagataatattcttactaaatgcrttggcagtatctgttaagtcttcacttacgctattggtttgataaaaatactgactttgcaaatcaatttgcttctctgtgctttggggattttcaggga

SEQ ID NO: 42181 - DNA, 201 bp, Homo sapiens
gagaaaaggtaccaatacatccagatagtttatagagatataaggatttattataaggtcttgactcacacatgaccatgggggctgagaggtcccacagygtgctgtctacaagctgtggaactgggaaagcgatggtatggcctgaagtcctgagaactgggagcaccaggggcaggagaaggaaaatgtcagggagcg

SEQ ID NO: 42182 - DNA, 201 bp, Homo sapiens
cacactgtttatcgtgtggacttgggaaaagtgagcatttgggatcttctgctggtcttgcctgagtccaggcatccatgtaatgcaagctgcctctctgygaggccagcagggctgcagagccggggctcatggtttgttcacctttgggatctgggaatacagcttcagccaatctcagtgccccacgaagtaacccac

SEQ ID NO: 42183 - DNA, 201 bp, Homo sapiens
ctgttactattgttgaatggctgaataagagcaaatgagggcgttccttccctctgacacatagtggggaaaagtgcgtctctgcatgtccagtgccctgyggcttggccttgcagccctcatgtctacacctggggtgcccggggcctctcctgcctcttcctaggtgggtggcctctgtgtgaagaaagacaagacaaa

SEQ ID NO: 42184 - DNA, 201 bp, Homo sapiens
cctttgtgggcacgaagtaggggagtatttagatttgcagctgtgtgcagccatttagactagatatctgagtggctggcctcgggctttagggtggggamggcaggctgtctggcttgcccctgagatgtcatgcggcctaaaggaattctgttactattgttgaatggctgaataagagcaaatgagggcgttccttcc

SEQ ID NO: 42185 - DNA, 201 bp, Homo sapiens
gcacgctggcgtgactggggcagaaagcagagtggtgttttcttctttgggggcctttgatagggacctgggcagggtgtggtgggggccggaggtgcagwggcttctgcaggaggctggggaggctccccgtggtcttagaggaggtgcaccatcccgtcccacctcactcgccccctttacccttctttcctttataaa

SEQ ID NO: 42186 - DNA, 201 bp, Homo sapiens
tattaataggactggatcctttgtgggcacgaagtaggggagtatttagatttgcagctgtgtgcagccatttagactagatatctgagtggctggcctcrggctttagggtggggacggcaggctgtctggcttgcccctgagatgtcatgcggcctaaaggaattctgttactattgttgaatggctgaataagagcaa

SEQ ID NO: 42187 - DNA, 201 bp, Homo sapiens
tgggttctgcctcctgattgggaggaggggctgggtgccctgccctgaatctgaatgtagaggccctgggtaaacgggtgtgccctgtcctgcctggaccrcacatcaggagccctgggagcagaggttccgggcggctggaggcctccttgcttccgcctctgcacgtggaacctgcatttcttcacaggagaccgtggc

SEQ ID NO: 42188 - DNA, 201 bp, Homo sapiens
cttacacacgtcttgctagagcttgaggacttaaccagagaattttctgtgggcgtcccgctgtagcatgttagggccttaggttagtttgccctcctagrtgagaaatccacaaccctaagacttgagtacccaagtctgtggcatgtggtgacatgcttgattttgaagtggttttccctagaagattggtaaaggaat

SEQ ID NO: 42189 - DNA, 201 bp, Homo sapiens
gattctgtttccaagttcagaaggagcagcagaaaatgaagtatctcgaatggcagatcacatgccatgacttttaaagcccagagcactctccaggagtrcaggctgtcattggtgtggcccagcaccggcagcctctgtcccgactatttatgggaaaaaatatttttttgtaaatatgatcttgacaaaacattggct

SEQ ID NO: 42190 - DNA, 201 bp, Homo sapiens
gccagatttgacttagtgagaatttcaaatctagtctatttaaaaagaaattcaattttcttacttataaggtgtgaaatatataccataaaatcaaaacrcattaaaaagtgttccttagtgtacaatactagggggatttaaaaaataaatataagctttgtttaggtagtgcattaagcatatttgagattactaatt

SEQ ID NO: 42191 - DNA, 201 bp, Homo sapiens
attaagtacttaatatgtgagacgcactgtgccagatttgacttagtgagaatttcaaatctagtctatttaaaaagaaattcaattttcttacttataasgtgtgaaatatataccataaaatcaaaacgcattaaaaagtgttccttagtgtacaatactagggggatttaaaaaataaatataagctttgtttaggta

SEQ ID NO: 42192 - DNA, 201 bp, Homo sapiens
tcatagttgtaattaaatcttagatgaaattcctttttgagacagggactgtactttatttgtatttttggagaattcaataatcttcaatttataaatawatttatttccatgatctttcctctaatttacacatgggtaacaatagacatagttttagccatgttttcattatgaaattaaaatatacaaggacagagt

SEQ ID NO: 42193 - DNA, 201 bp, Homo sapiens
ttttattctgttgagaaagtaaatattctaggtagttaatgtatttcttccctgtcttataacatgatggtcttaaaggacgggagagacatttcctagcrtggctctgatgtgatctgggtgactgacgtgttctgggtcatgagccgattgatacatgagggatgtgcattcttgtatctcaatcttggctggttgtgg

SEQ ID NO: 42194 - DNA, 201 bp, Homo sapiens
ggacagcctgggcagccaggtacagtgtggagctccggtccccagtgtggcaagggctcaggatgaggcctgtgttccccagctctttctgtagatgtcarcctgtcagactgctttctttatggttctaggacctaaaggtgatccaggtataagtggaaccccaggtgctccaggacttccgggaccaaaaggatctgt

SEQ ID NO: 42195 - DNA, 201 bp, Homo sapiens
ctggaaatgcataaatgtggatcccagttccagcactttctggctgagtagtcttggatctatcagctcacttctttgagtatcagcttcttcctctgctrtgtcctggtttccatgttttccttgcagagctgcaataagggtcagagatgctatagaatgggtcatagtgcctagcaggctggtaaccaatgctagcca

SEQ ID NO: 42196 - DNA, 201 bp, Homo sapiens
ctcatgcattctagggcccaccaggactgccagggcttcaaggtcctgttgggcctccaggatttaccggaccaccagtaagttttgggggctgtctctcygaggcaatcatttaaaaaacaactatattgaggtttgaaaataaataataatttagtaaaaactttacacagttgtggtcgctcttaatttggacatggc

SEQ ID NO: 42197 - DNA, 201 bp, Homo sapiens
atccaaatttctaatcaacgttgtggttttatcatccatttccggaatcattaccccttaaaatgtgaggaaaacgactctccttttcttcaactccccawcttttccaaataccgctgcgagtttttgttgccaacagcttttcccaatgtgcgtgtacttaccaacgtccagactcctccctcccatcggccagccttg

SEQ ID NO: 42198 - DNA, 201 bp, Homo sapiens
gcctcccaaagtgctgggatgacaggcgtgagccactgtaccgagcctctgaccctttttatttctgaagccaggaacggcctttgtgaaagagtgcatcrgtggataaaaccttgattctagtgtaagttcccccatctacccactgtttttcaccaagttgttttgaccaagttatgccctgacctggaaattccccag

SEQ ID NO: 42199 - DNA, 201 bp, Homo sapiens
ctcggcctcccaaagtgctgggatgacaggcgtgagccactgtaccgagcctctgaccctttttatttctgaagccaggaacggcctttgtgaaagagtgsatcagtggataaaaccttgattctagtgtaagttcccccatctacccactgtttttcaccaagttgttttgaccaagttatgccctgacctggaaattcc

SEQ ID NO: 42200 - DNA, 201 bp, Homo sapiens
ctcgttggctggtgctggatggctatgttgccgtcacaggtgttgagggggccctggctctgtctatggcatcgtgctgtgagctggaggtggcaagggcrggacatttgcctgctcctcaggcgcttcccctgtggatggacaagcagaggagatacatgggagggaaacaaatgcttctactttccagcttcccgattg

SEQ ID NO: 42201 - DNA, 201 bp, Homo sapiens
tctttgcatatttaaaatcagttttcagataagacatgaaactaattctaaagaaaactgattgcacttgaggattaaggggaaagttttcagaaaagctygttggctggtgctggatggctatgttgccgtcacaggtgttgagggggccctggctctgtctatggcatcgtgctgtgagctggaggtggcaagggcagg

SEQ ID NO: 42202 - DNA, 201 bp, Homo sapiens
ttttctttgcatatttaaaatcagttttcagataagacatgaaactaattctaaagaaaactgattgcacttgaggattaaggggaaagttttcagaaaakctcgttggctggtgctggatggctatgttgccgtcacaggtgttgagggggccctggctctgtctatggcatcgtgctgtgagctggaggtggcaagggc

SEQ ID NO: 42203 - DNA, 201 bp, Homo sapiens
tataaaggaaaatactcgttccttagcatttcttaattttctttgcatatttaaaatcagttttcagataagacatgaaactaattctaaagaaaactgaytgcacttgaggattaaggggaaagttttcagaaaagctcgttggctggtgctggatggctatgttgccgtcacaggtgttgagggggccctggctctgtc

SEQ ID NO: 42204 - DNA, 201 bp, Homo sapiens
ctgagtcccgaagtccattgtatcactcttatgcctttacatcctcatagcttagacgccacttatacgtgagaacatacggtatttggtttcccattccygggttacttcacttagaataatggcctctagctccattcaagttgctgcaaaagacatcattttgttccttgttgtggctgagtagtgttccatggtgca

SEQ ID NO: 42205 - DNA, 201 bp, Homo sapiens
tgggccaggcctggggccgagtatgttttatgcacattattgtaatatctattatacagtggaagaaaccaaccagcccgggctttttccacttggtggtrttgacagtttgagtgggataatttttggttgtgggtctgtcctgtccattgtaggacgttgagcagcttcccagcctttacacatcggatgccaggagca

SEQ ID NO: 42206 - DNA, 201 bp, Homo sapiens
tgtctgtctaaaatgtgtatcttatctgatttgaaaaggctggagaagtctgtggccagtctggaagtgatttcattgctggcccaggaaatctgggaagagtttaatgtcgtgtatggctgagcttgtacaggataccctttcttttgttatggcaaacagtttgtagctttaccagccatttagcgcctagatatttga

SEQ ID NO: 42207 - DNA, 201 bp, Homo sapiens
acctgctcctctacactcctgtttctccattgccaactttggggttcttactgtttttttttaattttttttaattccataaagaacatttaaaataaaaygctagcaagctctaccttagaccattctgaatttgtgatttaaaaggcaatgatgattgaatggattcagaagacctcttgaagtctaggcctaggacaa

SEQ ID NO: 42208 - DNA, 201 bp, Homo sapiens
ctgttcgacatgggcagatgaccgagacgattttcaaaggcagaccttcagtcacaggtttaattttttcatttaccgaagaaccatgaaagaaaaaggtyattttccattttttctaggtgagtgtactaaaatgtaattaaagcaactgaaatctccaaacagagcatgtttgaaatacagtatatttaacaatcccgg

SEQ ID NO: 42209 - DNA, 201 bp, Homo sapiens
cactgcgccatgagggcggtagccagtgaaaaagcagcccggccccatttccctccattgattacaaataatcggttcaacagctgctgtattactaatgrcaagccaagaaatgtggagactgaatcttcgaaaatctttaaattaataaaactttagatctcatcttcaaattatcaagtaggatcaagattcctggag

SEQ ID NO: 42210 - DNA, 201 bp, Homo sapiens
taaaatgctaggccacccagaatgtgacacaaaaatcatgatcttagacatcttttgttctgaaaagctaaccctaatttagatatttttggaatgatcarttttttagaattgataatcaaattccctacacacataaagccatgcatgtttttggtccaggattaaaaaaaattacttgcttatgaaaaagcgtaaggt

SEQ ID NO: 42211 - DNA, 201 bp, Homo sapiens
gaacctgggtaacctgcattatttatgtaccccttttaaacacagtaatttacaacagtgaattaagacttgcattacctgacttttattttaattcaccrtttgaagcttatacattacacctgagtgaagggggtactcaggtcatcctttgtattttttttttctttttagcagtgaaccattgaactgcagctaaaa

SEQ ID NO: 42212 - DNA, 201 bp, Homo sapiens
gtgaacctgggtaacctgcattatttatgtaccccttttaaacacagtaatttacaacagtgaattaagacttgcattacctgacttttattttaattcaycatttgaagcttatacattacacctgagtgaagggggtactcaggtcatcctttgtattttttttttctttttagcagtgaaccattgaactgcagctaa

SEQ ID NO: 42213 - DNA, 201 bp, Homo sapiens
ctgcatatagctttagatttttctgggagtccagatgcaaggtgtatttcctcaggaaatgatgaaatggtgacatagcttttcacatgtcaggtcaccartgaaattgtgaacctgggtaacctgcattatttatgtaccccttttaaacacagtaatttacaacagtgaattaagacttgcattacctgacttttattt

SEQ ID NO: 42214 - DNA, 201 bp, Homo sapiens
tagttgctaagtggccctgaggttactgatgtgagcttctgtctggttgcaggcctccctgtacctgggcaggctggtgcccctggcttccctggtgaaaraggagaaaaaggtgaccgaggatttcctggtacatctctgccaggaccaagtggaagagatgggctcccgggtcctcctggttcccctgggccccctggg

SEQ ID NO: 42215 - DNA, 201 bp, Homo sapiens
agctggtgcgtccctcacagaagcagcagagctttctccatgcagcctcctgcaccaccactctctcaagccctgcgtccggcctcagctctcccaggggyacatggtcttacccttacagagttacagtggccgaacctgacctgatatgttcacacctaatggctactctgacttcaaacccttttacagaaccatctt

SEQ ID NO: 42216 - DNA, 201 bp, Homo sapiens
tctccattagacatgctgcccctcattcaccactcaggaagggcacacagtattttgtggaagcccacaggggccgcccctcggggctcttggctgccttkgagcacgttgtgcttgtggcttttctccccagtgacaggctggatgtctcaggctctgtgcccctttggtcagcgctcttccctctcctctccatgctgc

SEQ ID NO: 42217 - DNA, 201 bp, Homo sapiens
gcccccagctccctgaccgtcctcctcaccctgagggtctggttggcctcgtgcccgggtagttccttcattttcctctccattagacatgctgcccctcmttcaccactcaggaagggcacacagtattttgtggaagcccacaggggccgcccctcggggctcttggctgccttggagcacgttgtgcttgtggctttt

SEQ ID NO: 42218 - DNA, 201 bp, Homo sapiens
aggctaagaaacaaatctacgtaagaaataaaacaacttgttacatgttgctgtccacgacttgagaaaggaacgacttgttgaaatggaaagaaaatgakcccctattttaaaatacacgaatattgccacagtataaaggaaaatactcgttccttagcatttcttaattttctttgcatatttaaaatcagttttcag

SEQ ID NO: 42219 - DNA, 201 bp, Homo sapiens
gccagttccgctcatcaatgattctgttttccgaggaagtgtgcagttgatgggacaagtatctgggcttttgtaaggagaataattagcccccaacttayattttgcagagatctttattttcatgtgtcatgcgtgtgcaaagcaaaatgaaatctattcatttttgttgtaatcgtcacagaatgagagatattaaag

SEQ ID NO: 42220 - DNA, 201 bp, Homo sapiens
tgttcatgttattttggtttgacacttttaaaataaggctaagaaacaaatctacgtaagaaataaaacaacttgttacatgttgctgtccacgacttgaraaaggaacgacttgttgaaatggaaagaaaatgagcccctattttaaaatacacgaatattgccacagtataaaggaaaatactcgttccttagcatttc

SEQ ID NO: 42221 - DNA, 201 bp, Homo sapiens
ttttctcacactctcctcatcatagcctgatgctgggagcagaagctggtgcgtccctcacagaagcagcagagctttctccatgcagcctcctgcaccaycactctctcaagccctgcgtccggcctcagctctcccaggggcacatggtcttacccttacagagttacagtggccgaacctgacctgatatgttcacac

SEQ ID NO: 42222 - DNA, 201 bp, Homo sapiens
ctcatcatagcctgatgctgggagcagaagctggtgcgtccctcacagaagcagcagagctttctccatgcagcctcctgcaccaccactctctcaagccytgcgtccggcctcagctctcccaggggcacatggtcttacccttacagagttacagtggccgaacctgacctgatatgttcacacctaatggctactctg

SEQ ID NO: 42223 - DNA, 201 bp, Homo sapiens
atatatacaagccgtgaacttgtaagatcagagttatcccggaatttgccaattcccagtaaatgaccctacacatacatcggcaccatcattggaagtcytagtcccatcttcatactgtcaggaatgggcaagttgtacatttgacccacagatgaacattatttattatctgattgacaggcttcatagctattttct

SEQ ID NO: 42224 - DNA, 201 bp, Homo sapiens
ccaagagctttctagggtcctctttttccacattggtctggggtacctgtgttgctgttgtccatggctggtctgcttttataagagagaccgagaccccygcctttctttcctttgagaactcccagccatattccccgtcttccaagtggagactgccttcgtgacccactttcatcctcatgaccactcgggttaagt

SEQ ID NO: 42225 - DNA, 201 bp, Homo sapiens
tataaataataaattcacccccaaccccaagagctttctagggtcctctttttccacattggtctggggtacctgtgttgctgttgtccatggctggtctrcttttataagagagaccgagacccccgcctttctttcctttgagaactcccagccatattccccgtcttccaagtggagactgccttcgtgacccacttt

SEQ ID NO: 42226 - DNA, 201 bp, Homo sapiens
ggccacatggtctatggggaagaggctaaaaggactttcaaaactgacttggttttcattaagtttgtctacagttttaggagtataaataataaattcayccccaaccccaagagctttctagggtcctctttttccacattggtctggggtacctgtgttgctgttgtccatggctggtctgcttttataagagagacc

SEQ ID NO: 42227 - DNA, 201 bp, Homo sapiens
tattgtacaatctttgtgtattttaagaacttaatatactttataacgtgaatactgatggtggatctctgaatatcttaattggagcatgaaagaaaagyttcacagtattaattattttaacatatcctgaaaagtttaagagacttttagagaatataaaagatatttggtttagggattactttgtagtaccttttg

SEQ ID NO: 42228 - DNA, 201 bp, Homo sapiens
tttattttttaattgacttgatttttagagcaagtttaggttcacagcaaaattgtacagaaggtaccaagagttcccacgtacctcttctcgggcacackcatggcctctcccatgatctctacatcccgcaccagagtgggtcattggctacagtgcgtgaacctgcaccgacacgtcactatccccctgtccatagtt

SEQ ID NO: 42229 - DNA, 201 bp, Homo sapiens
ctgtagatgcgagaaaaccagaaataggctttatttcttattaaaaccattaacttctcttcctcccctttcttctttggcactcgtactgtgtattgtamaatctttgtgtattttaagaacttaatatactttataacgtgaatactgatggtggatctctgaatatcttaattggagcatgaaagaaaagtttcacag

SEQ ID NO: 42230 - DNA, 201 bp, Homo sapiens
tgcaggtttttattttttaattgacttgatttttagagcaagtttaggttcacagcaaaattgtacagaaggtaccaagagttcccacgtacctcttctckggcacacgcatggcctctcccatgatctctacatcccgcaccagagtgggtcattggctacagtgcgtgaacctgcaccgacacgtcactatccccctgt

SEQ ID NO: 42231 - DNA, 201 bp, Homo sapiens
gcccctgccgtgtggccgtggggcttatccctgggagtggaatttgggggaaggagccggggccagggcccagctacagcggaggcggctgagcgccttcyagagggttgggaatgtcccgctcgcaatcccgccgggagcgtgtggggcccgcgcttgctgcgtactcttaattctgcccaagtagccctaagatacagt

SEQ ID NO: 42232 - DNA, 201 bp, Homo sapiens
gcactccagcctgcgccacagagcgagaccccagcaggacgtgatgaaggtcaatggggttttgtccaacttgcctcagttggagcaacgtaccagtgcgyccctgccgtgtggccgtggggcttatccctgggagtggaatttgggggaaggagccggggccagggcccagctacagcggaggcggctgagcgccttcca

SEQ ID NO: 42233 - DNA, 201 bp, Homo sapiens
actaattatttcagatagtggaggtaaagtgggtaagactttactctttgatcaagggtctacccaaatcttgactagtcttcttaattacttaatttatagatttttgatgaaattgagtttctgtgtgagcccccatagtggaaatctaagcttcctactgttttttttaaacattttctctctatattgcagcaggta

SEQ ID NO: 42234 - DNA, 201 bp, Homo sapiens
cttcaaggtcctgttgggcctccaggatttaccggaccaccagtaagttttgggggctgtctctccgaggcaatcatttaaaaaacaactatattgaggtktgaaaataaataataatttagtaaaaactttacacagttgtggtcgctcttaatttggacatggcggaatcagcttccctcttactaaacgtttggctgg

SEQ ID NO: 42235 - DNA, 201 bp, Homo sapiens
aattttattgaagtttatcaacttacagaaacatatcaaaggcgaagggtacagctcagtgcattttccccaaagtgaacatagcagtgaacccagactayggaccagaacattaccagaaggcacgaagtccctggagtcctcttctagtcagtagccctcacgagtaaccaggatccaacgtcatcttgttcggctttg

SEQ ID NO: 42236 - DNA, 201 bp, Homo sapiens
tactaattatttcagatagtggaggtaaagtgggtaagactttactctttgatcaagggtctacccaaatcttgactagtcttcttaattacttaatttatagatttttgatgaaattgagtttctgtgtgagcccccatagtggaaatctaagcttcctactgttttttttaaacattttctctctatattgcagcaggt

SEQ ID NO: 42237 - DNA, 201 bp, Homo sapiens
ggtactaattatttcagatagtggaggtaaagtgggtaagactttactctttgatcaagggtctacccaaatcttgactagtcttcttaattacttaatttatagatttttgatgaaattgagtttctgtgtgagcccccatagtggaaatctaagcttcctactgttttttttaaacattttctctctatattgcagcag

SEQ ID NO: 42238 - DNA, 201 bp, Homo sapiens
gcaggcagtctttgagggaaactttgatgtgcatgtgtgggtgtgtgcatgagtgtgagagcatgcacatgcctgtgtgcatgtgcctgagtgtgcattgygttcatatgtgtgcctgtatgtgagggagtgtatgcatgtgtctgcatatgcagatgtctgtatacacagaaaggtgtgtgcaggtgcacatgtgcgtgt

SEQ ID NO: 42239 - DNA, 201 bp, Homo sapiens
caagatcaaagctgagtttcaaggctcatagtagcagcgattcaaggctgcgctcaggcttaattattattattattattattattattatttttttttttgagagggagtttcgctcttgtttcaggctggagtgcaatggcacgatctcggctcactgcaacctctgcctcccgtgttcaagttattctcctgccttag

SEQ ID NO: 42240 - DNA, 201 bp, Homo sapiens
gcaagatcaaagctgagtttcaaggctcatagtagcagcgattcaaggctgcgctcaggcttaattattattattattattattattattatttttttttttgagagggagtttcgctcttgtttcaggctggagtgcaatggcacgatctcggctcactgcaacctctgcctcccgtgttcaagttattctcctgcctta

SEQ ID NO: 42241 - DNA, 201 bp, Homo sapiens
gtctctcctggggatccagatctattctgcccagctctgatgtaaccccaccagagccagcctgcccccctcttttcccacggctcccactgagcaggtcytgtctttccacagagccccgattctagcacagtcaggcgccttcctcctcagcgtcctgaccactttcccctctctctgggatgtttcccagctggagat

SEQ ID NO: 42242 - DNA, 201 bp, Homo sapiens
tattttaccagcaagatcaaagctgagtttcaaggctcatagtagcagcgattcaaggctgcgctcaggcttaattattattattattattattattattatttttttttttgagagggagtttcgctcttgtttcaggctggagtgcaatggcacgatctcggctcactgcaacctctgcctcccgtgttcaagttattc

SEQ ID NO: 42243 - DNA, 201 bp, Homo sapiens
tccagaaacacaccctcaaaaacacatccagaagtcatgctttaccagctctctgattatcctgtgacccagtcaacttggcacctaaaattaggcatcaygggccaggcgtggtagcccatgcctgtaatcccagcacttttggtggccgaggtgggtggatcacctgagatcagaagttcgagaccagcctggccaaca

SEQ ID NO: 42244 - DNA, 201 bp, Homo sapiens
aagtacatataaaggattgtgctaggaatgagatataaatatttcctgccctcaagagtttaaaacacagtagagcaaaaccacctgaagtagtcgttgcyatctgtttccagacactcactgtggacttgcgcaaggctggatgctgcttagatttattatgggaagtggctcataggattatagaggctgaggagttcc

SEQ ID NO: 42245 - DNA, 201 bp, Homo sapiens
tccctggcccacaaggttcacctggcttacctggagacaaaggtgcaaaaggagagaaagggcaggcaggcccacctggcataggcatcccagggctgcgwggtgaaaaggtaaccagcgctctgcgtggaaaggtccccttctcccagctcagtggagatgctgcctgagaaatgctcagcaaatatctcagcacactca

SEQ ID NO: 42246 - DNA, 201 bp, Homo sapiens
tgccccaccagtgtccttgcagcactctggccttcaggcagccctgtgcagggctgaagccgacacctgggctgttctgctggcacacagacctcctccgmgggaagtgtgctcctgctggcttgtccagccaccttccttgtaatgggcttagcgtggtaggggccacagcttctctcctcttaaccagcaagctccttg

SEQ ID NO: 42247 - DNA, 201 bp, Homo sapiens
atgcccgaaggtagaaaccacgccctattcaccctgtcgcttggggcccaggacaactcttgaacatcttaaacattatataggtgtcttgtctctagccrgagatttcatggggaggaggctgaaatgttaggtaagattttaaaacagttaggtatgatttaatagataagaagaacatgagatatacagcgtgatttg

SEQ ID NO: 42248 - DNA, 201 bp, Homo sapiens
tttcccgggcactgacatcctccctgtggttctgggctctgaggtccagttcacctgctccctcgaggatgcacgttcacagtgcctgctggttcctgacmgggcagcaccactcagcaagtggccatcctcctctgctgtcttcacctcttcctcccgagtatcatcctcgtccaaaaccatttttccttctccagcatc

SEQ ID NO: 42249 - DNA, 201 bp, Homo sapiens
aagaatatctatttgctatccttgttgctgaaagtatcggatagacccccccgccgccggtctggggcacgaatagagtgtagctgggttaaagtggatgsaaacccctcaccccatggccgacctccgcatttccagttgcacctgtaaatacaccagggcttcaaccctctttaaacttcccaatgttcttcaaactcc

SEQ ID NO: 42250 - DNA, 201 bp, Homo sapiens
cttgggtttagagtggatgaaaccatcagatgtggaaataccagatggaggaatgggagggaggctgtggacagcaaatgtgtttctccagtgtgcaagayttcttggcactttgatgaggatgttgtgtgtcacaactgtaatgatgcaagaatattgtcctttgtcttaaaattgtgttgctctttggccatgtcagcc

SEQ ID NO: 42251 - DNA, 201 bp, Homo sapiens
tttaccgtgaggctgggtgcggtggctcatgcctgtaatcccagcactttaagaggacgaggcgggtggatcacctgaggtcaggagttcgagaccagccygaccaatgtggtgaaaccttgtctctactaaaaatacaaaaattggctaggcgtggtggcgggcgcctgtaatcccagctacttgggaggctgaggcagg

SEQ ID NO: 42252 - DNA, 201 bp, Homo sapiens
gttagatcctatcccacaggaaagaatatctatttgctatccttgttgctgaaagtatcggatagacccccccgccgccggtctggggcacgaatagagtrtagctgggttaaagtggatgcaaacccctcaccccatggccgacctccgcatttccagttgcacctgtaaatacaccagggcttcaaccctctttaaact

SEQ ID NO: 42253 - DNA, 201 bp, Homo sapiens
gccattctcctgcctcagcctcccgagtagctgggactacaggtgccctccaccgcacccagctaattttttgtatttttagtagagacgaggtttcaccrtggtctccatctcctgacctcgtgatctgcctgcctcggcctcccaaagtgctgggattacaggcgtgagccaccgcgcccggcccactttgaccatttt

SEQ ID NO: 42254 - DNA, 201 bp, Homo sapiens
tccagctgtgtggtgcagtttggaaggtcagatgggcgggggaggaaggttccagaaacatgcatgtggcgtgtcaggaagtggaggctcctgagtggatytggagagggctgggctgatggtaaatgagcacagcggtgcctggagcagactctgccctccgtggctttctcccctcttcgggagcctggcgtgggtgtc

SEQ ID NO: 42255 - DNA, 201 bp, Homo sapiens
tcctcaggctgtgagaggctaattgccctcaattccctaagttatggtcatagacttgctggttcaggatctgccatggccacctactatctcactggggytccccctctttttggcttggctgtgcattccctttgtggtacggatctgtcaaatttttctggcctcgttccttgctactcctcgacatacggctttggt

SEQ ID NO: 42256 - DNA, 201 bp, Homo sapiens
cagctatgattgctatcatagagactatttaatagtccctctgtgaaatggaagtaatattaaattaatcaatagaatgcatttgttgaatgcatagtgartgcgtggttagatcctatcccacaggaaagaatatctatttgctatccttgttgctgaaagtatcggatagacccccccgccgccggtctggggcacgaa

SEQ ID NO: 42257 - DNA, 201 bp, Homo sapiens
  misc_feature (1)...(201): n = A,T,C or G, or insertion/deletion polymorphism (see Tables 1-2)
acatctctaataatgctttatttatatgtatattactatgtaatataaaacaatcaaaatttattttcagatccgcagttcccttgtgtgcaagtaatgcntgatttctgagcacagtggcatttattttcatatcatccaagagcaccagctttgaaatgtcattttaaaatataagcaactcttttttatcattagctt

SEQ ID NO: 42258 - DNA, 201 bp, Homo sapiens
tgctcatttaagcttcacagtatgtggtagcaaaaggttttctagaattttctggatgttaacatgcttaatacaagttctttgtctttaggaaccatatktctatttctacaaatctcatagccttgttgtattgtatgcactgtaggcaatgggaaaataagtattcaatgaatgtcagtgagaaaagaaagaaacgag

SEQ ID NO: 42259 - DNA, 201 bp, Homo sapiens
actcatccctagagatgatccacattcagaagaaaatgacagatgatgcacgttcagaggagaatactatgtgtcttcattgcacaaagataaaccttgcmtaatcctcacattcagcacatggggcatttttgaaggtactaggtcagtatttgttctctgtttcagcgttgtacagataaacccaatgataaccatttt

SEQ ID NO: 42260 - DNA, 201 bp, Homo sapiens
tattaccatttaaattttcttttctttttttttgagatgaagtctcactctgtcacccaggctggtgtgcagtggcatgatcttggctcactgcaacctcyggctcctgggttcaagcgattctcctgccttagccgcccgagtatctgggactacaggcgtgcgccaccacgcctggctaatttttgtatttttttagta

SEQ ID NO: 42261 - DNA, 201 bp, Homo sapiens
taagagctggctttccaaacatccaggactgtagaaagaaagaaccactcagttacgcaaatcctgttctcacccgggaaatcaaacgcattaatgttgakttggagatgattttacttccctttaatcatttcctaaagctcaattacattcccggccactgtctttgcagtgtcccttgaggtgccatggactgttttt

SEQ ID NO: 42262 - DNA, 201 bp, Homo sapiens
attttcaaattcaaaatatttattaccatttaaattttcttttctttttttttgagatgaagtctcactctgtcacccaggctggtgtgcagtggcatgawcttggctcactgcaacctctggctcctgggttcaagcgattctcctgccttagccgcccgagtatctgggactacaggcgtgcgccaccacgcctggcta

SEQ ID NO: 42263 - DNA, 201 bp, Homo sapiens
ctcaaatgcttaaaaatgatttttgctacttaccagattttccatacttattcttttactgttcttaatcttgttctttgttttcctctttaaaaaaaaawtttacttctctcctggaagaatgatactcactaaatccacttaactgtatagaaattgttaactgttacatgccagagagaactggtgatatacacacac

SEQ ID NO: 42264 - DNA, 201 bp, Homo sapiens
tacattttcaaattcaaaatatttattaccatttaaattttcttttctttttttttgagatgaagtctcactctgtcacccaggctggtgtgcagtggcaygatcttggctcactgcaacctctggctcctgggttcaagcgattctcctgccttagccgcccgagtatctgggactacaggcgtgcgccaccacgcctgg

SEQ ID NO: 42265 - DNA, 201 bp, Homo sapiens
gcccctttgtccgcgcctggacccgtccgcctgcccctcgggggtcgcgcgtggcacggccaggtgcattctctgggccggggttcgttgggggtccctgyaggctacgatcgcgcattggtggaccgagcctcctttgttatggtatgggtactggagagttaaggaattcctccggggaagggaggagaaacagcccgc

SEQ ID NO: 42266 - DNA, 201 bp, Homo sapiens
agtccggccttccgagagctagctgtccgccgcggcccccgcacgccgggcagccgtccctcgccgcctcgggcgcgccaccatggggccccggctcagcstctggctgctgctgctgcccgccgcccttctgctccacgaggagcacagccgggccgctgcgaaggtgagttcccggccagctccgctcccggcgtcccg

SEQ ID NO: 42267 - DNA, 201 bp, Homo sapiens
cgcaccgccgggggggagggggcagcgccaacaaattggggagctcggcccgccgcgctcaggtctccgcttggagccgccgcacccgggacggtgcgtakcgctggaagtccggccttccgagagctagctgtccgccgcggcccccgcacgccgggcagccgtccctcgccgcctcgggcgcgccaccatggggccccg

SEQ ID NO: 42268 - DNA, 201 bp, Homo sapiens
tcaagctagacgtctgggctggagggagaaaatgagaatttcgggaagaagatacagatttgcagccacgctttttatgcatgattggtttaatctttgcygctttaatgttaaatatttaaatgcaagaaataatagtaatgataaatgtagctgctaagtgcaacaatccacactgttaaatttcattcacatacttct

SEQ ID NO: 42269 - DNA, 201 bp, Homo sapiens
aatactagtggagagacagctctgcaaatagactgtcctaatgaagcaaagtgatttacagaatgaggaccagaaggcagcccgagcccacaagaaaggcygcatagaggaggctaattttagctgggattgaaggatgcataggagctaatattaactcaagagaaacagtttaaaaatcccacaacacctttcaagtaa

SEQ ID NO: 42270 - DNA, 201 bp, Homo sapiens
ctggcatccctggcccacaaggttcacctggcttacctggagacaaaggtgcaaaaggagagaaagggcaggcaggcccacctggcataggcatcccaggrctgcgaggtgaaaaggtaaccagcgctctgcgtggaaaggtccccttctcccagctcagtggagatgctgcctgagaaatgctcagcaaatatctcagca

SEQ ID NO: 42271 - DNA, 201 bp, Homo sapiens
ttgtcagcctgagtagcttatggctccagagccctttgtgttagttcagaagaattctccggactcctctgctccaatcccggactagccttaatgctttrccatcagtgtctattgtagtgagagcagccgggaagaggaggagagtgcgggaagggctgggtggtgatggtcctcagagctcactcagaaagggggaga

SEQ ID NO: 42272 - DNA, 201 bp, Homo sapiens
cccaggagtgcctggaaaggacgggcaggcaggacagcctgggcagccaggtacagtgtggagctccggtccccagtgtggcaagggctcaggatgaggcytgtgttccccagctctttctgtagatgtcaacctgtcagactgctttctttatggttctaggacctaaaggtgatccaggtataagtggaaccccaggtg

SEQ ID NO: 42273 - DNA, 201 bp, Homo sapiens
cccctgctcaagctctctagcctgccgccatgtaagatgtggctttgctcttcctttgtcttctgccatgattatgaggtctccccagccatgtggaactktgagttcattaaaccttttttctttataaattacccagtcttgggtatgtctttattagcagtgtgagaacagactaatacaggtggcacggagcagaga

SEQ ID NO: 42274 - DNA, 201 bp, Homo sapiens
cccacgtgctaagggtgcagccaggtggaggtaattgaatcatgggggcagtctaccccatactgttctcctggtagcgaataagtctcaagagttgcgayggttttataaatgggagttcccctgctcaagctctctagcctgccgccatgtaagatgtggctttgctcttcctttgtcttctgccatgattatgaggtc

SEQ ID NO: 42275 - DNA, 201 bp, Homo sapiens
aaaactgagactcagtacccattaaacagaaaaaaaatgtcatactgtatgtcagcacgagaggcatgcattccgtcttcatctctagaaagcttgggccrgagatggccttttgtaccacccttgccgtggtgacacttggttttagttggctgtgactactagggatctatgagttcagtaagtcacaagcctgtcctg

SEQ ID NO: 42276 - DNA, 201 bp, Homo sapiens
ctcttgcaaaactgagactcagtacccattaaacagaaaaaaaatgtcatactgtatgtcagcacgagaggcatgcattccgtcttcatctctagaaagcytgggccggagatggccttttgtaccacccttgccgtggtgacacttggttttagttggctgtgactactagggatctatgagttcagtaagtcacaagcc

SEQ ID NO: 42277 - DNA, 201 bp, Homo sapiens
atctattctgcccagctctgatgtaaccccaccagagccagcctgcccccctcttttcccacggctcccactgagcaggtcctgtctttccacagagcccygattctagcacagtcaggcgccttcctcctcagcgtcctgaccactttcccctctctctgggatgtttcccagctggagatcagactccaggacaaaacc

SEQ ID NO: 42278 - DNA, 201 bp, Homo sapiens
tggactccttgcagcccttgaaatgaaatactggttttaaaatacagccgtaaactggaaggttatcatgaaggagacttagacccattggggaacacatygaagtgaagcagatcaggacagctggaaattccaggcagggaggattaatcagtgcagcagaatcaggagatgcgtgtttccctgaaacatgtattgttt

SEQ ID NO: 42279 - DNA, 201 bp, Homo sapiens
gaggtccttgggggatcagtgctagcagccgcctttagggcacaagtgttgatggactccttgcagcccttgaaatgaaatactggttttaaaatacagcygtaaactggaaggttatcatgaaggagacttagacccattggggaacacatcgaagtgaagcagatcaggacagctggaaattccaggcagggaggatta

SEQ ID NO: 42280 - DNA, 201 bp, Homo sapiens
catacaagaggcaaaatctactttttcattcgtctagaagatagcatcaaattccattttgatgataaaaataaacacaggagctgggcatggtggtacaygcctgtggtcccagcttcttgggaggctggggcaggaggatcgcatgagtccaggagtttgaggttgcactgagctacaactacagcactgcactccagc

SEQ ID NO: 42281 - DNA, 201 bp, Homo sapiens
tttacttgcagggagatcaagggatagcgggtttcccaggaagccctggagagaagggagaaaaaggaagcattgggatcccaggaatgccagggtccccrggccttaaagggtctcccgggagtgttggctatccaggtaggtgaggggggcttctcttggacttggggaatctaagaaatcaaagaaaagcccaaactt

SEQ ID NO: 42282 - DNA, 201 bp, Homo sapiens
aggtaggggagctgataaccctagaagctcattttgtgtctatttctcgatgccacttgggaaattctcaagttgtcatagatcatatttccctttaagaygcctacaaaagaagttaggaacatcaagcagaaggctgggagacccccttcttccagtaggattcctggtgctcaatgcacatggggttgaaactgtgct

SEQ ID NO: 42283 - DNA, 201 bp, Homo sapiens
ggccactgtctttgcagtgtcccttgaggtgccatggactgtttttaagagatgcagcctgtgggcacttctgatcacagctgacctcacagatattatcrttactctgtattttccctggcttaattagagaaaagtgcttaatgtgcagatgatgtatgggtatacaagaaaatcacttaaaaactgaatctgcctaat

SEQ ID NO: 42284 - DNA, 201 bp, Homo sapiens
cttttaaaacattctgtggcttcagaggaaatgcagctggcttgttggacatagaaatcgtgagaataaacacaaaatatttacgtgtttaaaaagcagtraagtcagaccagtttctttcagaaccatttgtacagcatttaactgaatacttgagcacgtttgatttttaaaataatgctgccaggtaaaacaggcagg

SEQ ID NO: 42285 - DNA, 201 bp, Homo sapiens
ctcgccactgcactccagcctgggtgacagagtgagactccgtctcaaaaataaataaataaataaataaataaagtagctggatatttgaaatacccaayaataaccacgttggagcaattacagcatgccgttctggctcgcaagtgtgctgattatgtcaataaccatattgagcctgttttatgaattcctattccc

SEQ ID NO: 42286 - DNA, 201 bp, Homo sapiens
ctacttccaggctaaccatggaggagtgtggtggctttactaagacccaggctgacctgacagaataaatggaatgttctatgcttgaactgcctgaattmcagagatatttattaaggaaaaaacacaaaaccttgagtataagataaaggggggagtttcttgaaactgtcatcttttttaaatactcaagaaattcca

SEQ ID NO: 42287 - DNA, 201 bp, Homo sapiens
aaaggaattaatggtgtttacttaaaagagattaaaattcagttatttattaatttagattgatctcactactgctttttcaaattaatgaggttaggctratagtgggttttgtaaaacctccagctctgctgagattaccttgtattctatgggcaaagttggtttgtctagttttaacctggcaattgtatatctggg

SEQ ID NO: 42288 - DNA, 201 bp, Homo sapiens
gtggaactgcatgacagccccatgaaaaccagtgcagataagattgtgtccgaaggacagggcaggcttcgctcataaacaagtcaagatgccagaaccayctccatttgcatagtgccctcgctttgaaagtgttcttctatttaaagaagttttcttttccttccagggtggctgtgctggctctggctgtggcaaatg

SEQ ID NO: 42289 - DNA, 201 bp, Homo sapiens
ggccttcccggctttcttcttcttttcatttgtagcgaagtgtcaccattgtggaacatccatgtgtgcaatgctgagaagagttccccccctttttttttagaggggacttatgatggaggatggaagaaatgagaattcagagagacaagcatgggccacctgccacgcccacaggtgatctgcgctacatgcatgtgc

SEQ ID NO: 42290 - DNA, 201 bp, Homo sapiens
gcaacgtggacgctctctggaggtgtctggcagacccaggagaagacagtggccacagtaaggagggcagccagccctctcgatgcaggcccacgggagayaggccagcactgcagaagggactcactgaatagtagtgccaagaaagtcagtgttgagaatgaaagaaaatactgtgaaatgggcactggttagaaagtt

SEQ ID NO: 42291 - DNA, 201 bp, Homo sapiens
cagatggagcaaacacgcagcaaactaaggaccgtcagtggcttcccattggctcattgaacaagttaacaccactgcagtattttagttattttaaaaastaactttaaagaatcccaagttctttatacgtggcaaacttcatcatttggtaatggatttagaaataaaagtaagctccaaattaaaagaaaattgcca

SEQ ID NO: 42292 - DNA, 201 bp, Homo sapiens
actgtcagttaattaaatctccttactttataaattacccagtctcaaggagtatctttatagcagttatagcagtgtgagaatggactaacaaaaataaycacctccagattggaaatatatgaaaagttgagagtcaagaaactatagtccagtctagaccacagcatggcctcttttggggggcccgtgaaccccttg

SEQ ID NO: 42293 - DNA, 201 bp, Homo sapiens
ccttcggtgtgcagtgctggactcgcctctgctgctgcagtgagggcagtagcgagtgaaacactgcgccatgagggcggtagccagtgaaaaagcagccyggccccatttccctccattgattacaaataatcggttcaacagctgctgtattactaatggcaagccaagaaatgtggagactgaatcttcgaaaatctt

SEQ ID NO: 42294 - DNA, 201 bp, Homo sapiens
aaataaattatcatgttgaccagagaatcttaagataacgtcagcctgaagaagggcttaaagctccctagagttctgaatcctatttaattaaaatgctstctctcccagggtcccccaggccctcccggccctccaggtgaaaaggtaaaagttcttttcattttttgttctttggcattagtataaggctatcatgaa

SEQ ID NO: 42295 - DNA, 201 bp, Homo sapiens
caggcgtgcgccaccacacccagctaatttttgtatttttagtagagatagggtttcaccatgttggccaggctggtctggaactcctgacctcgtgatcygcccacctcagcctcccaaagtgctgggattacaggcgtgagccaccgcgcctggcctgacacccatcatttacaggtagctcccgaggcttgaggcatt

SEQ ID NO: 42296 - DNA, 201 bp, Homo sapiens
gatataataggtatgaggaagctttgcaaacgcttgaaaagggttgagcagataatattcttactaaatgcattggcagtatctgttaagtcttcacttaygctattggtttgataaaaatactgactttgcaaatcaatttgcttctctgtgctttggggattttcagggagagcctggagttggtctaccgggactcaa

SEQ ID NO: 42297 - DNA, 201 bp, Homo sapiens
gatgggctcccgggtcctcctggttcccctgggccccctgggcagcctggctacacaagtgagttccctcagaaatggtttaatgtggggtgcaagcagaygccagggtgccgggcagacccaggttgggggctgtgatagtcccccacagccagagtgtaatagaaaggcgtggattcttctaatcatccatattcctct

SEQ ID NO: 42298 - DNA, 201 bp, Homo sapiens
acacacacacacgagtagcatagcagctggtattcttcggttcagttaaaaaggcattctgtaaacagaatgagtgagctttcctctttttgcatcctctsgaatggaattcactgtaatcttgagaagagcgccctcttggtctgtagatgcgagaaaaccagaaataggctttatttcttattaaaaccattaacttct

SEQ ID NO: 42299 - DNA, 201 bp, Homo sapiens
cctccctccctccctccctctctctctgccacacacacacacacacacacacacacacacacacacacacacacgagtagcatagcagctggtattcttcrgttcagttaaaaaggcattctgtaaacagaatgagtgagctttcctctttttgcatcctctggaatggaattcactgtaatcttgagaagagcgccctct

SEQ ID NO: 42300 - DNA, 201 bp, Homo sapiens
agctcagcatgaagggaccttcccaggcatgtacttgaagctgctgcttttgcatcaagtctgcctctacttccctctcgtagagaggctgcccctttgtycctgtctctgagcaagcaggtttccacggttactgaacttagtggtttccacgacttctcaggacttacaggttccttctcagctcttccctttagggag

SEQ ID NO: 42301 - DNA, 201 bp, Homo sapiens
aacccagcaggcggaggttgcagtgagccaggatcgcaccattgcactccagcctaggcgacaagagcaaaactctgtctcaaaaaaaaaaaaaaaaaaaagtttatttcttagaaatattcagaaataataggaaagtggccagtgaacaaattcatttgactaagaagctattccgtaattttactttttacatattaa

SEQ ID NO: 42302 - DNA, 201 bp, Homo sapiens
tttccacttgagattcatcaattgcttacattttgccacattcgtggttttactgcctctccatattactcttgatttttgctgtgccatttgagattaarttgtaaaggtcatctcccttagcccctgaacatgtcagcgttagacccaaggacaaggattttcttttacgtaagcatgatacctttattaagttcagga

SEQ ID NO: 42303 - DNA, 201 bp, Homo sapiens
ctccaattaatgcagccaatgctaaattttccaggcagtagttgaatcctcagcatttattttcagggagacggatcaaaagacctttgaactacttagawtcaagaagttctgtggcaaagaaagcacacgagatgtcctagggtcaccaatgtcactgttttaaaaacccagatttctcccgtaaatagaatgatggca

SEQ ID NO: 42304 - DNA, 201 bp, Homo sapiens
ataaagatttaagtttcaagtttttttcaccttaagtttaatatctatctaatttaaattttgcttaaatagacgaataaatctctttgtctttttattcstttaaggggatgccaggggtcggagagaaaggtgaacccggaaaaccaggacccagagtaagtgctttccaaagtccttttatcataaaacaattctcct

SEQ ID NO: 42305 - DNA, 201 bp, Homo sapiens
cggggtccccaggcttcccaggtccccaaggtacgattggaattccagctcaccgggataccacgagagtttcctcacgtttttctcacgctgactgttgrtctttctcaccacaggagaccgaggctttcccggaaccccaggaaggccaggcctgccaggagagaagggcgctgtgggccagccaggcattggatttcc

SEQ ID NO: 42306 - DNA, 201 bp, Homo sapiens
ccaacttctctatatgaccagcctctttacatggagtggaggcctctttcagggaaaggaggaagagagcctccacgtggggagtacacattctactacarcatgcacgagcttgaaagcagaagcttgagttagggagagaacacccgagggctggccgtggcctccacgaaggccctcctggggcagtgccgcctggga

SEQ ID NO: 42307 - DNA, 201 bp, Homo sapiens
agagagcctccacgtggggagtacacattctactacaacatgcacgagcttgaaagcagaagcttgagttagggagagaacacccgagggctggccgtggmctccacgaaggccctcctggggcagtgccgcctgggacccttcccacagggcaaggactgctctcctagccccagggcttccctttcccgcaaaagccag

SEQ ID NO: 42308 - DNA, 201 bp, Homo sapiens
gtgtgtttgtgtgtgtgtgtgtgtgtgtgtgtgtgtgtgtgtgtgtctaccgtacccatacttggtcatctatcgcccaattgatgtaacttaaaaaaaartccatatacgtgggaaagtgtaacatgtttatatactctacaatctatttttattagaaagtttatacctcataatttgcaaactgtaacccagttggtc

SEQ ID NO: 42309 - DNA, 201 bp, Homo sapiens
ctcaagtgagcgcagagctctccagctgcaccattacagataatggatcgttcgtaatcacccgcggatcatgttgtttggataatttcccaccaaacgamcgtaatttaggtcaatctcaaagcaacttagactttggtaaattgagagagaacagcaaaagtattttgactttttgagaccggctcactaagaaatcac

SEQ ID NO: 42310 - DNA, 201 bp, Homo sapiens
agctttcccttcccacggctgggactcccttccagctctctttgccttgtgccaggatcaccactgaaccctcatggccctgcccctcctcccagctctcstgctctccagcccattcctcaggctgtgagaggctaattgccctcaattccctaagttatggtcatagacttgctggttcaggatctgccatggccacct

SEQ ID NO: 42311 - DNA, 201 bp, Homo sapiens
gggtcctcctggttcccctgggccccctgggcagcctggctacacaagtgagttccctcagaaatggtttaatgtggggtgcaagcagacgccagggtgcygggcagacccaggttgggggctgtgatagtcccccacagccagagtgtaatagaaaggcgtggattcttctaatcatccatattcctctaagggaatctt

SEQ ID NO: 42312 - DNA, 201 bp, Homo sapiens
ggtaaatcagagaaagttcttcattgggaaataggagctgtttgcatttcgattttctgatggataatgttagcaaagcaaagaaagctaactgtaagagytggctttccaaacatccaggactgtagaaagaaagaaccactcagttacgcaaatcctgttctcacccgggaaatcaaacgcattaatgttgatttggag

SEQ ID NO: 42313 - DNA, 201 bp, Homo sapiens
gctgagctctaaaccaagtcatcaaacaaggtgtgggatctttttaggcattctggttctagctggggtgggcgagctggagagttgaccttggttaatayattcaagcccgagggagggccccacagccccactccacaccctggggcccttctatagtctgggactcagggcgtccaggtgacagctgaacagagactg

SEQ ID NO: 42314 - DNA, 201 bp, Homo sapiens
tttcgagagtgtttccacttcaattttgagtccactatatactgtgagatgcagaaaaggcagagtcagcatttgccttcttcatgtgttcacgtatctayggtctatgtgaaattacagaattattactttctctgtctatggaaaaatgtgtgtaggtatacttcattttttctgagttactgaaaaagaaaaagaggt

SEQ ID NO: 42315 - DNA, 201 bp, Homo sapiens
tatgtgaaattacagaattattactttctctgtctatggaaaaatgtgtgtaggtatacttcattttttctgagttactgaaaaagaaaaagaggtctgayttttagttcaaagccatttttcacctatgtgctgtacattacagttcttaaaacagtaaaactttaaaggatatttctggcggagaaactttttttgttt

SEQ ID NO: 42316 - DNA, 201 bp, Homo sapiens
aagcagcagagctttctccatgcagcctcctgcaccaccactctctcaagccctgcgtccggcctcagctctcccaggggcacatggtcttacccttacaragttacagtggccgaacctgacctgatatgttcacacctaatggctactctgacttcaaacccttttacagaaccatcttgtgtgtccttagttgtgatt

SEQ ID NO: 42317 - DNA, 201 bp, Homo sapiens
tatggaaaaatgtgtgtaggtatacttcattttttctgagttactgaaaaagaaaaagaggtctgacttttagttcaaagccatttttcacctatgtgctrtacattacagttcttaaaacagtaaaactttaaaggatatttctggcggagaaactttttttgttttaaagaggctatgaccagaaatttctggcctaat

SEQ ID NO: 42318 - DNA, 201 bp, Homo sapiens
gagctggagagttgaccttggttaatatattcaagcccgagggagggccccacagccccactccacaccctggggcccttctatagtctgggactcagggygtccaggtgacagctgaacagagactgcccatgactttgtcattaggtgaagaccctgtaagggagaggggagggccttcagtgctggtgcatgagtgtt

SEQ ID NO: 42319 - DNA, 201 bp, Homo sapiens
tgtggggaaggcaggggaggcggtgtccagcacctggcctgaaggaaaggggccgccaacatttcatctcaacattgcccaaggaggagcccttgctgggrgtggccccctctggccaggcgaggtctgtgcctgtcctggcttggagcctgcgtggggcttgcgccctgcttaggacaggaaggcagagaagtgtggggc

SEQ ID NO: 42320 - DNA, 201 bp, Homo sapiens
tagggtgaaagaggcctcccggggttacaaggtgtcattgggtttcctggaatgcaaggacctgaggggccacagggaccaccaggacaaaaggtaagcayggctgtgggattgggggtgggtggatgtaagattgcccgcattcttgagatagcggtgatcaatgacaatggcatttctattctgttccagggtgatact

SEQ ID NO: 42321 - DNA, 201 bp, Homo sapiens
gcgggtggtcctcgctgtggatcggctactcttttgtgatggtaagtgtctggggagacgccatatttcccgggaagagccccactcacgccccatagtcscctctgtctggtgcctccacaccttggagttctctgcatctcgctgcttaagcccctccttcttcctccaaccgtccccttccaaagcatgcctcgaagc

SEQ ID NO: 42322 - DNA, 201 bp, Homo sapiens
actcgtactggctgtccacccctgagcccatgcccatgtcaatggcacccatcacgggggaaaacataagaccatttattagtaggtgagtcgagcatctrtaggaacaaatgcaaaattgaagaggaaaagtctctagtctggacaagcatatgttttctatttttctccaaaacgttgaatccattgccatttagctta

SEQ ID NO: 42323 - DNA, 201 bp, Homo sapiens
gaaatgactactcgtactggctgtccacccctgagcccatgcccatgtcaatggcacccatcacgggggaaaacataagaccatttattagtaggtgagtygagcatctgtaggaacaaatgcaaaattgaagaggaaaagtctctagtctggacaagcatatgttttctatttttctccaaaacgttgaatccattgcca

SEQ ID NO: 42324 - DNA, 201 bp, Homo sapiens
gatggaattggactagggtgaagggacataactttaagaccaaccagaagacacaatgttcatgtactctgactagattcacagaattatcaatgctatayattattaatagtcacgtgtacacaggatgagtgtgctttaggcaccagaggaccttacattttatacctgcttttaagcagatgatttgggggtactcat

SEQ ID NO: 42325 - DNA, 201 bp, Homo sapiens
gggcaaaccgaacggtcattcgcaggccccaaaagctcaggcagccgctcaggtgcggtggcccatgatttacgcctccaaattccatttccctgtttgaygtcaggtttttcccgatttggaaatgttggtgctttgagaaatgtccatggacaactgtgcctcctcacctcccccttctcacttccacatacaagactc

SEQ ID NO: 42326 - DNA, 201 bp, Homo sapiens
ctttcctggtgtttggggagggaacctctgactcacggctcgcatctgttctgcagcacaccagcgctggtgcagaaggctctggccaagccctggcgtcycccggctcctgcctggaggagtttagaagtgcgccattcatcgagtgtcacggccgtgggacctgcaattactacgcaaacgcttacagcttttggctcg

SEQ ID NO: 42327 - DNA, 201 bp, Homo sapiens
catggtcggattctagtgtgttattaaagagaaggagggatcggagcccttgctgcagtttcctgtggtgtccctggaagctccctctgagcggtacctayaggatgaggcacgcctcatcccatctctgccgtccacgctggagattactgttctgctgctgcgtttcccatcacctcaaactgtttttcttgttcaggt

SEQ ID NO: 42328 - DNA, 201 bp, Homo sapiens
gtggcacgatctcggctcactgcaacctccatctcctgggttcaagtgattctcacgcctcagcctcccaagtagctgggattataggcgtgtaccccccmacctggctaatttttgtagttttagtagagacagggtttcaccatgttggccaggctggtctggaactcctgacctcaagagatttgctgtctcggcctc

SEQ ID NO: 42329 - DNA, 201 bp, Homo sapiens
atttttaattttggtaaaatggacataacataacatttaccatcttaataatttttcagtgcacagtgtagtggcattaagtacatttgcagtgttgtttwaccatcaccgccatccgtctcctgaacttttttattttcccaaactcaaactctgtccctgttaaacactgactccacatccctcctgccagcctctggt

SEQ ID NO: 42330 - DNA, 201 bp, Homo sapiens
cgaggtgggcagatcacctgaggtggggagttcgagaccagcctggccaacatggcaaaaccctgtctctactaaaaatgcacaagttagcatggtggctyatgcctgtaatcccagccacttggaaggctgaagcaggagaattgcttgaacctaggaggcagagattgaagtgagccgagatggtgccactgcactcca

SEQ ID NO: 42331 - DNA, 201 bp, Homo sapiens
agtacttagcatcaagttctgactctgttgatggttgttctttgtttagaagcgtcccagaaatgtctcttttatgactccattagaggtaggggataccrggtttgatggaggaggacttcggtgagccaggcatagggacttccgatcactttcccttgggtctcttgattccacaatcaacaaatcaagtgctgtctt

SEQ ID NO: 42332 - DNA, 201 bp, Homo sapiens
catagaaggcctgattttcggcagccaatcctaaagcataatcagaagaatgttgggccccacttccaggatttgtccacattgctgggaatgatcaagayggcctcataaagatttcctaataaaagacagcagcataacagttccctccatgccacagattctgttatctcacaagcagttaatggaattcatgttttt

SEQ ID NO: 42333 - DNA, 201 bp, Homo sapiens
aaaaggaccaggtcagagtttgctttggtgtgttggcatctttcctgtgaaagggatttcactccatagaaggcctgattttcggcagccaatcctaaagyataatcagaagaatgttgggccccacttccaggatttgtccacattgctgggaatgatcaagatggcctcataaagatttcctaataaaagacagcagca

SEQ ID NO: 42334 - DNA, 201 bp, Homo sapiens
taaaatgatttatttaagaaaatgtatttggaaatcatgcttttatattattttatttcatttctctttttaaaattgaaaaaccctggttgccagttccrctcatcaatgattctgttttccgaggaagtgtgcagttgatgggacaagtatctgggcttttgtaaggagaataattagcccccaacttatattttgcag

SEQ ID NO: 42335 - DNA, 201 bp, Homo sapiens
ttagtccacgtaaattaagtaattctcaatcacagagtatcgagtaataatttagaaatgagatttgtactaagatttataatgtatgttaaagaggctayatcttaaagccattgctacctcaggacttatcgatagagcattaaccacacaatgcagccatttgtgcatgtaagttctgccactgcattcttgtctcaa

SEQ ID NO: 42336 - DNA, 201 bp, Homo sapiens
ctgccctcaagagtttaaaacacagtagagcaaaaccacctgaagtagtcgttgctatctgtttccagacactcactgtggacttgcgcaaggctggatgmtgcttagatttattatgggaagtggctcataggattatagaggctgaggagttccatgatctgccgcctgcaagcctgggaactcaggactcctgaagtg

SEQ ID NO: 42337 - DNA, 201 bp, Homo sapiens
tttcccacatacttaccggctttggagccaagtgggggtgggcagagttagggcgtaggttccttttatttggaaccctcttcacaatctcttcctagaayaagcatcttccggaacttagttgatgatctgggtgggaaaggtggagacagccctgaaagtcagagttttgccccttctccctttccgaggaccgtgaag

SEQ ID NO: 42338 - DNA, 201 bp, Homo sapiens
ggaccctacgattagtctggcaaaagaaaagtctgtttctcaaagaagctggcattaacgggtcagacgtgcacacgactttttggaaaggcgatggcaaygtctcaactacatccagagaggagacagtccagggacacactggttgtgcaccagtcacaggccctgcagggaaatgtgtgggccctggtcttcctcatg

SEQ ID NO: 42339 - DNA, 201 bp, Homo sapiens
tctcctgaccctttacatagagataattgacttgatgacccattgatcccatctgcctacctgccagtcatcatcctttgagttcctgtccctccctacakgttgagggagggacctggtgggagatgattagattatgggggcagtttcccccatgctgttctcatgatagtgagtgagttctcatgagatttgatggtt

SEQ ID NO: 42340 - DNA, 201 bp, Homo sapiens
ctcctatgtaggaaaatcttagatctttgatccccttacattaaaatatctactgacagttttctttgattttttttgagctataagaaaacttattttataggtcttaaaatggagaatatcattcattacacttccagaatggcacttttcagaatgcaggcaatacttcacctgtgtgagtggctgccagatattgac

SEQ ID NO: 42341 - DNA, 201 bp, Homo sapiens
cctcctatgtaggaaaatcttagatctttgatccccttacattaaaatatctactgacagttttctttgattttttttgagctataagaaaacttattttataggtcttaaaatggagaatatcattcattacacttccagaatggcacttttcagaatgcaggcaatacttcacctgtgtgagtggctgccagatattga

SEQ ID NO: 42342 - DNA, 201 bp, Homo sapiens
gcctcctatgtaggaaaatcttagatctttgatccccttacattaaaatatctactgacagttttctttgattttttttgagctataagaaaacttattttataggtcttaaaatggagaatatcattcattacacttccagaatggcacttttcagaatgcaggcaatacttcacctgtgtgagtggctgccagatattg

SEQ ID NO: 42343 - DNA, 201 bp, Homo sapiens
gctgactgtgcgtggcacctggtaagcgtttgaacacgtggtagcttgcttcctttccagcttttatcacaggcttggattcatttccttccattttaaamgttaatttttatgttagaagtgaactacaggctgggcacagtgtctcatgcctataatcccagcactttgggaggctgaggcgggtggatcacatgaggt

SEQ ID NO: 42344 - DNA, 201 bp, Homo sapiens
tgcctcctatgtaggaaaatcttagatctttgatccccttacattaaaatatctactgacagttttctttgattttttttgagctataagaaaacttattttataggtcttaaaatggagaatatcattcattacacttccagaatggcacttttcagaatgcaggcaatacttcacctgtgtgagtggctgccagatatt

SEQ ID NO: 42345 - DNA, 201 bp, Homo sapiens
cccgattattcatctcatacctctttacattctgtccacaatacctgtgtctgtcatggtttaaaattgggattcttctaaggaaattgcaagtgcgtgtrtgtaccgacgtatttctatcttttcatgtgatgacaattttacataatggaaattgaagttgggttctaatttcaactttgtcctagcgtgttataataa

SEQ ID NO: 42346 - DNA, 201 bp, Homo sapiens
gtgcctcctatgtaggaaaatcttagatctttgatccccttacattaaaatatctactgacagttttctttgattttttttgagctataagaaaacttattttataggtcttaaaatggagaatatcattcattacacttccagaatggcacttttcagaatgcaggcaatacttcacctgtgtgagtggctgccagatat

SEQ ID NO: 42347 - DNA, 201 bp, Homo sapiens
ccaggcacagtggctcacgcctgtaatcccagcactttgggaggccaaggcaggtgaatcacctgaggtcaggagttcgagaccagcctggccagcatggygaaatcccatctctactaaaaatacaaaaattagctgggtgtggtgttacatgcctgtaatcccagctactcaggaggctgaggcaggagaattgcttga

SEQ ID NO: 42348 - DNA, 201 bp, Homo sapiens
ctgtttgtgtattgtatgtatatctgtgctttatacataaaattatacagatttatacataaaaagttatacaataatacacacactcccagttccaccartttttgctcccttgggtgatattgtacccatcgaaaatgcatgtgttggactgagcgatctcccttgagtgtttatccgcactaatatctgaagtacgtt

SEQ ID NO: 42349 - DNA, 201 bp, Homo sapiens
aaactcaaactctgtccctgttaaacactgactccacatccctcctgccagcctctggtgaccccccattctactttctgtccctgtgaatttgacccccrtagacacctcatgtaagtggaatcatacagtatttttccttttgtcactggcctgtttcactcagcataatgtcctcagggttcatctatattatagcat

SEQ ID NO: 42350 - DNA, 201 bp, Homo sapiens
cttattaacccgattattcatctcatacctctttacattctgtccacaatacctgtgtctgtcatggtttaaaattgggattcttctaaggaaattgcaartgcgtgtatgtaccgacgtatttctatcttttcatgtgatgacaattttacataatggaaattgaagttgggttctaatttcaactttgtcctagcgtgt

SEQ ID NO: 42351 - DNA, 201 bp, Homo sapiens
ccgggaggtcgaggctgcagtgagcggtggtcacaccactgcactccagcctgggtgacagagcgagaccctgtctcaaaaaaaaaaaaaaaaaaaaaaaagagagagagaaagaaagaagaagaacaagctatgtacatgaaaacaaaaaaactatccatgttggtatatctgttgcctaaaaattgagaccccagtata

SEQ ID NO: 42352 - DNA, 201 bp, Homo sapiens
cccgggaggtcgaggctgcagtgagcggtggtcacaccactgcactccagcctgggtgacagagcgagaccctgtctcaaaaaaaaaaaaaaaaaaaaaaaagagagagagaaagaaagaagaagaacaagctatgtacatgaaaacaaaaaaactatccatgttggtatatctgttgcctaaaaattgagaccccagtat

SEQ ID NO: 42353 - DNA, 201 bp, Homo sapiens
gtgaggtgggagctgcaagtgtcctgaggagaggggcgggcaggacactcacgtctgtgcacgtgattcaggtcaggacagccccccacccgccctgtgarcacctctgtgctggtccaagtgcaaagaggcccacccctgggggacgtgcaatcgcccttggcttctgccactgcatggcgacccccctgccgagtttca

SEQ ID NO: 42354 - DNA, 201 bp, Homo sapiens
acagccccccacccgccctgtgaacacctctgtgctggtccaagtgcaaagaggcccacccctgggggacgtgcaatcgcccttggcttctgccactgcayggcgacccccctgccgagtttcactggccactgaaggcaaagagagtagcagagtgcccagcgtcaccggcaggatagacccaaaagtgacacccacgtt

SEQ ID NO: 42355 - DNA, 201 bp, Homo sapiens
tgtggcttggccttgcagccctcatgtctacacctggggtgcccggggcctctcctgcctcttcctaggtgggtggcctctgtgtgaagaaagacaagacraacagcatctctgtgggccattctccaccctcagcctcaggttttccaaatgccactcctgaattttctggagttttgtgtcgtttccaaacttgtttcg

SEQ ID NO: 42356 - DNA, 201 bp, Homo sapiens
gcacagtaaagaattcttcctgggaaaggtgctgttggcttctccaccggtgggagcctacagcatgaaagtcgccgaaaaccacatcatctcaaaagggwatggtttaagcacagtattcatcctgcttcctctttacagcagaccatacttctagggcatcatttaattttccaaaccatgttttgggagagagaatga

SEQ ID NO: 42357 - DNA, 201 bp, Homo sapiens
accccattcctggtgccagtcagtgtctgtctgtctctgtatacatacttatgtataaatatgtgtttgtatatatgtttatatacatatatatttgttcmtgttattttggtttgacacttttaaaataaggctaagaaacaaatctacgtaagaaataaaacaacttgttacatgttgctgtccacgacttgagaaagg

SEQ ID NO: 42358 - DNA, 201 bp, Homo sapiens
tacagagtctaagtggtgacttagacaagccttcagaagagcacatctcagggtgcaataagtgaccagcagccttgtgtatttctgtgtgtgtgtgtgtgactttggctctttgctgcacctgaatatatagcccttcttagtggtggtcatggatctttggtttgatttttagcttaaccatgtccatggctaaaggat

SEQ ID NO: 42359 - DNA, 201 bp, Homo sapiens
atacagagtctaagtggtgacttagacaagccttcagaagagcacatctcagggtgcaataagtgaccagcagccttgtgtatttctgtgtgtgtgtgtgtgactttggctctttgctgcacctgaatatatagcccttcttagtggtggtcatggatctttggtttgatttttagcttaaccatgtccatggctaaagga

SEQ ID NO: 42360 - DNA, 201 bp, Homo sapiens
tgtaaaactagcccagccatctcttaggactggcaggaggacagggaattgcagttgaacagttcaagtcataaaagataaccagcaatattccatctttytttactgacctgatccagatacagagtctaagtggtgacttagacaagccttcagaagagcacatctcagggtgcaataagtgaccagcagccttgtgta

SEQ ID NO: 42361 - DNA, 201 bp, Homo sapiens
gaggctgaggcaggagaatcgcttgaacccgggaggcagaggttgtagagagccaagatctcgccactgcactccagcctgggtgacagagtgagactccrtctcaaaaataaataaataaataaataaataaagtagctggatatttgaaatacccaacaataaccacgttggagcaattacagcatgccgttctggctc

SEQ ID NO: 42362 - DNA, 201 bp, Homo sapiens
gggcatggtggcaggcacctatagtcccagctactctggaggctgaggcaggagaatcgcttgaacccgggaggcagaggttgtagagagccaagatctcrccactgcactccagcctgggtgacagagtgagactccgtctcaaaaataaataaataaataaataaataaagtagctggatatttgaaatacccaacaat

SEQ ID NO: 42363 - DNA, 201 bp, Homo sapiens
ccccatctctactaaaaatacaaaagttagctgggcatggtggcaggcacctatagtcccagctactctggaggctgaggcaggagaatcgcttgaacccrggaggcagaggttgtagagagccaagatctcgccactgcactccagcctgggtgacagagtgagactccgtctcaaaaataaataaataaataaataaat

SEQ ID NO: 42364 - DNA, 201 bp, Homo sapiens
gaaacaccttaagatgaggttgtttaataattctatgatagtcctccccaacaggagccccacgattccgtgtgaatgacatgcacagagtcacgtcattmatttattttcatttattcatatatccattttcatatgtgtcatatattcattgaactaaattgttcaagcatctgctctgcaccgagaactgtgcttata

SEQ ID NO: 42365 - DNA, 201 bp, Homo sapiens
tgtgctctttgtgctctgctcagcagccgctgccctcgctgtgggtttcctttgtgattaatccttatctgctcaaaaaggcttgcttcacatttgccctkggctgctggtccctggcagagtgcaactctgctgccttatgccttttttaagtttttggattcctttcaaattttctcaaatctcattaccctgattaaa

SEQ ID NO: 42366 - DNA, 201 bp, Homo sapiens
atgccaaggatacaaagataggaaaccttggtcctaccctcagagccctgaaatactagtggagagacagctctgcaaatagactgtcctaatgaagcaamgtgatttacagaatgaggaccagaaggcagcccgagcccacaagaaaggccgcatagaggaggctaattttagctgggattgaaggatgcataggagcta

SEQ ID NO: 42367 - DNA, 201 bp, Homo sapiens
tctggatgccaaggatacaaagataggaaaccttggtcctaccctcagagccctgaaatactagtggagagacagctctgcaaatagactgtcctaatgawgcaaagtgatttacagaatgaggaccagaaggcagcccgagcccacaagaaaggccgcatagaggaggctaattttagctgggattgaaggatgcatagg

SEQ ID NO: 42368 - DNA, 201 bp, Homo sapiens
ggagtgcagtggtgcgatcttggctcactgcaacctctgcctcctgggttcaagtgattctcccatctcagccccccgtgtagctgtgatcgcaggtgccygccaccatgcccagctaatttttgtatttttagtagagacagggcctgactatgttggccaagctggtctcgaactcctgatctcaggtgacccacccac

SEQ ID NO: 42369 - DNA, 201 bp, Homo sapiens
aatgagaatattagcaacatatttgactcctttttttttttgaaatggagtcttgctctgttgcccaggctggagtgcagtggtgcgatcttggctcactkcaacctctgcctcctgggttcaagtgattctcccatctcagccccccgtgtagctgtgatcgcaggtgcctgccaccatgcccagctaatttttgtattt

SEQ ID NO: 42370 - DNA, 201 bp, Homo sapiens
cccttttagttggggaactaactaaaaaaaaaaaaaaaatctaaaaaatatttgtcaatctgacaggcagaaaaaaaaaacctcattattgctttatttttctctcttaatatgagactaggtaatgtaagtctttactaatataagagataattttggaatagtcatcaccaaaggcgaatggaaagctgcggggagggc

SEQ ID NO: 42371 - DNA, 201 bp, Homo sapiens
gcccttttagttggggaactaactaaaaaaaaaaaaaaaatctaaaaaatatttgtcaatctgacaggcagaaaaaaaaaacctcattattgctttatttttctctcttaatatgagactaggtaatgtaagtctttactaatataagagataattttggaatagtcatcaccaaaggcgaatggaaagctgcggggaggg

SEQ ID NO: 42372 - DNA, 201 bp, Homo sapiens
ggcccttttagttggggaactaactaaaaaaaaaaaaaaaatctaaaaaatatttgtcaatctgacaggcagaaaaaaaaaacctcattattgctttatttttctctcttaatatgagactaggtaatgtaagtctttactaatataagagataattttggaatagtcatcaccaaaggcgaatggaaagctgcggggagg

SEQ ID NO: 42373 - DNA, 201 bp, Homo sapiens
cagggcccttttagttggggaactaactaaaaaaaaaaaaaaaatctaaaaaatatttgtcaatctgacaggcagaaaaaaaaaacctcattattgctttatttttctctcttaatatgagactaggtaatgtaagtctttactaatataagagataattttggaatagtcatcaccaaaggcgaatggaaagctgcgggg

SEQ ID NO: 42374 - DNA, 201 bp, Homo sapiens
ggtctgggaaggaatcagaagcctggggcctcaattttaaaatattcattcaaaaacttctagaatatggtgcaggccaaacagggtacatctgtggcccraatctggcctgcgggtcaccagtttgcaatctctgttccaaagttaaggcacccggtatctttatactgcagagttttgaactgtgttgtatggattacg

SEQ ID NO: 42375 - DNA, 201 bp, Homo sapiens
attttggcccagtcttttcataaactttgaaatatagtgactctgaaatgtatgcagttgtaatttttaggcgtacccggcagttaggatgcccgaggagggagactcttgatggttgtcttattctggggttacctaaaatgccttcttttttctcaagctctattaggtagtttgtattcctttcctccgtgccatcag

SEQ ID NO: 42376 - DNA, 201 bp, Homo sapiens
gattttggcccagtcttttcataaactttgaaatatagtgactctgaaatgtatgcagttgtaatttttaggcgtacccggcagttaggatgcccgaggagggagactcttgatggttgtcttattctggggttacctaaaatgccttcttttttctcaagctctattaggtagtttgtattcctttcctccgtgccatca

SEQ ID NO: 42377 - DNA, 201 bp, Homo sapiens
agattttggcccagtcttttcataaactttgaaatatagtgactctgaaatgtatgcagttgtaatttttaggcgtacccggcagttaggatgcccgaggagggagactcttgatggttgtcttattctggggttacctaaaatgccttcttttttctcaagctctattaggtagtttgtattcctttcctccgtgccatc

SEQ ID NO: 42378 - DNA, 201 bp, Homo sapiens
tggtacaggtggtgtttggttgcatgtataagttctttcgtggtgatttctgagattttagtgcacctgtcacccaagcagtgtacgctctacctgttacrtagtttttgatccctcacctccttccagccttccccccacctgagtcccgaagtccattgtatcactcttatgcctttacatcctcatagcttagacgcc

SEQ ID NO: 42379 - DNA, 201 bp, Homo sapiens
agagttttgccatgttggccaggctggtctcgaactcctgacctctggtgatctgcccgcctctatctcccaaagtgctgggattacaggcatgagcgagccaccgcacccagcccaaaaaatactcttgaaagacatttctcattaaagcccaccatcaccccatgatggcccaagggaggctaagcatcttgcatgagg

SEQ ID NO: 42380 - DNA, 201 bp, Homo sapiens
aagagttttgccatgttggccaggctggtctcgaactcctgacctctggtgatctgcccgcctctatctcccaaagtgctgggattacaggcatgagcgagccaccgcacccagcccaaaaaatactcttgaaagacatttctcattaaagcccaccatcaccccatgatggcccaagggaggctaagcatcttgcatgag

SEQ ID NO: 42381 - DNA, 201 bp, Homo sapiens
aaagagttttgccatgttggccaggctggtctcgaactcctgacctctggtgatctgcccgcctctatctcccaaagtgctgggattacaggcatgagcgagccaccgcacccagcccaaaaaatactcttgaaagacatttctcattaaagcccaccatcaccccatgatggcccaagggaggctaagcatcttgcatga

SEQ ID NO: 42382 - DNA, 201 bp, Homo sapiens
gaaagagttttgccatgttggccaggctggtctcgaactcctgacctctggtgatctgcccgcctctatctcccaaagtgctgggattacaggcatgagcgagccaccgcacccagcccaaaaaatactcttgaaagacatttctcattaaagcccaccatcaccccatgatggcccaagggaggctaagcatcttgcatg

SEQ ID NO: 42383 - DNA, 201 bp, Homo sapiens
ttactgaatctacccaattcgtatggtaaggctgcactgaagtccacatgctgtaaagtaaataggttttcttgatttcttacaatggttatgggttgttkttttttttttttttttgagacagagtctcactctgtctcccaggctagagtgcagtggcatgatcttggctctctgcaacctctgcctcccaggttcaag

SEQ ID NO: 42384 - DNA, 201 bp, Homo sapiens
tggttactgaatctacccaattcgtatggtaaggctgcactgaagtccacatgctgtaaagtaaataggttttcttgatttcttacaatggttatgggttkttgttttttttttttttttgagacagagtctcactctgtctcccaggctagagtgcagtggcatgatcttggctctctgcaacctctgcctcccaggttc

SEQ ID NO: 42385 - DNA, 201 bp, Homo sapiens
atggaattacagactcagtagccatatcttccaaccccccagtataaatttctgtctttctgctatgtgtggtactttgcagctgcttttgcagaaatcamaattttcctgtggaataaagatggtccaaaaatagtcaaaaattaaatatatatatatattagtaatttatatagatgtcagcaattaggcagatcaagg

SEQ ID NO: 42386 - DNA, 201 bp, Homo sapiens
tatggaaccctgctatgatcctgtctctttccagcttagatagtaagaggcagaacaacatacacgcttctctaattcgttactcatccaaaaagtgccgygtgcctaactggtggtttattggagcctttcaaggaactggaaacttgacatccatgctgcagatagagtttaaccattcactaccaaaatgagcgcact

SEQ ID NO: 42387 - DNA, 201 bp, Homo sapiens
gtttcaaatctaatacacagtgagctcttctttaaactctaatgaagctgggctggtcacctatttgggaagcagccattagacgatccctggggccatgytgagcaccatggggccccagccatgcaggcactggcttgcgggccagcccgataatttgggcacagagtgtgtcctgtggtgaccacatgaggctgcagt

SEQ ID NO: 42388 - DNA, 201 bp, Homo sapiens
ttgtcaccaccaacccttgtccgggtgtcaaaaggcctgaaacagtgattgcccataatttgtctaaatcaggagcaaacgaaaatagtgacgttctagaraacagtgtcttccagcacctcctctgagttctcaggacggtggctctgatctggaggtctggagaccccgtccttgcctctgctccgccttgaagctatg

SEQ ID NO: 42389 - DNA, 201 bp, Homo sapiens
aagagccccactcacgccccatagtcgcctctgtctggtgcctccacaccttggagttctctgcatctcgctgcttaagcccctccttcttcctccaaccrtccccttccaaagcatgcctcgaagcctggcctgccctgcctggtgacagcaggggtctccagcaccagccagaaccctcccctgctcacagccaaggta

SEQ ID NO: 42390 - DNA, 201 bp, Homo sapiens
agttgttttactgcccacaaaattcctccatcctctgcctattcatccctaccccgttacctctgacccctggcaaactatggatcctcttgctgtctccrtagttttgcattttccagactctcttatagttgtcttatagttggaatcgtatggtatgtagacttttcagattggtttcattcccttagtaatatacat

SEQ ID NO: 42391 - DNA, 201 bp, Homo sapiens
catgaggcctgaatgtgcatccattgaaatacattattttaaccttttacttctttctcctcctctccttccctccttttttcccttatctttctaccgtmctccctctgttgttcttaggaattattgggaatttggatttggttttgggcgcaggtaggggttaggagggtggttgccaagtttgagttttaagaggga

SEQ ID NO: 42392 - DNA, 201 bp, Homo sapiens
gctgtctccgtagttttgcattttccagactctcttatagttgtcttatagttggaatcgtatggtatgtagacttttcagattggtttcattcccttagkaatatacatttgaggttcctccatgtctgttcacgtcttgatagctcatttatttttagtgtgaatattccattgtctggatgtcccacaggttgtttgt

SEQ ID NO: 42393 - DNA, 201 bp, Homo sapiens
attttaatagtaatatattactacaatgaatatttaggaaaaagccttaattcttttttttttttttttttttttttttaaagcagagtctggctctgtcrcccaggctggagtgcagtggcacgatctcggctcactgcaagctctgcctccctggttcatgccattctcttgcctcagcctcccgagtagctgggacta

SEQ ID NO: 42394 - DNA, 201 bp, Homo sapiens
atatttaatattttaatagtaatatattactacaatgaatatttaggaaaaagccttaattcttttttttttttttttttttttttttaaagcagagtctkgctctgtcgcccaggctggagtgcagtggcacgatctcggctcactgcaagctctgcctccctggttcatgccattctcttgcctcagcctcccgagtag

SEQ ID NO: 42395 - DNA, 201 bp, Homo sapiens
caatggcactgaatatttaatattttaatagtaatatattactacaatgaatatttaggaaaaagccttaattcttttttttttttttttttttttttttaaagcagagtctggctctgtcgcccaggctggagtgcagtggcacgatctcggctcactgcaagctctgcctccctggttcatgccattctcttgcctcag

SEQ ID NO: 42396 - DNA, 201 bp, Homo sapiens
tcaatggcactgaatatttaatattttaatagtaatatattactacaatgaatatttaggaaaaagccttaattcttttttttttttttttttttttttttaaagcagagtctggctctgtcgcccaggctggagtgcagtggcacgatctcggctcactgcaagctctgcctccctggttcatgccattctcttgcctca

SEQ ID NO: 42397 - DNA, 201 bp, Homo sapiens
gcccccaacctgcctcttagtgaagcttctctctctttatgtctctctgtctctgtctcttcgtttctctctctctttctgattctgtgtttgtgtgtgtktgtgtgtgtgtgtgtgtgtgtgtgtgtgtgtgtgtgtgtctaccgtacccatacttggtcatctatcgcccaattgatgtaacttaaaaaaaaatccata

SEQ ID NO: 42398 - DNA, 201 bp, Homo sapiens
cttcaaaattggatttttaaaggaatctgcttcacccagtgacagagaagaacacacatgttcttttccatcctgtccaatattttgttcctgatgtagaccccccccccgcccccgcaccaccactcctcaggggcatcctgtgcttgatagcggggtgtcagctctggaagcatgtgggtgattttactgcagaagcac

SEQ ID NO: 42399 - DNA, 201 bp, Homo sapiens
ctatgttttcggtgatgtattctgaggaaaggggagcggtgactctgcagtattgagccaatgtgccttcatcctccctgtctcttcacatctgctgatgrgaaaaccaaagtttgtggaatccccaatgccatctggttttcctcccctttttcttttctgaaaaatcacgttccaagttgaagcaatcatagctgggaa

SEQ ID NO: 42400 - DNA, 201 bp, Homo sapiens
acacacaccacacacacatacataccacacacaccacttacatatacatggaacacacaccgtgcacacccacaccacgggcacacactcacacacacacrcactttcttcaggaacctcccagccctccccctccaccacgtggcctgaatggagccctcctcgtccacctgttttgggcttggttctgctcctttttcc

SEQ ID NO: 42401 - DNA, 201 bp, Homo sapiens
acgcaccacacacataacatatacacacaccacacacacatacataccacacacaccacttacatatacatggaacacacaccgtgcacacccacaccacrggcacacactcacacacacacgcactttcttcaggaacctcccagccctccccctccaccacgtggcctgaatggagccctcctcgtccacctgttttgg

SEQ ID NO: 42402 - DNA, 201 bp, Homo sapiens
ctgggtgccctgccctgaatctgaatgtagaggccctgggtaaacgggtgtgccctgtcctgcctggaccacacatcaggagccctgggagcagaggttcsgggcggctggaggcctccttgcttccgcctctgcacgtggaacctgcatttcttcacaggagaccgtggctccacaggtgtcctgcctgtcagggcagag

SEQ ID NO: 42403 - DNA, 201 bp, Homo sapiens
ctattttccccttctacaagacagacagttaaataactcgtgttggatctattttttaaacaatattttaggggcaggtctcgctatgttgcccaggccgkagagcagtggcccacaggcaggccgagcatagctccctgcagccttgaactcctggcctcaggcagtcctgcctcagcctccccagtagccaggactaca

SEQ ID NO: 42404 - DNA, 201 bp, Homo sapiens
gaggcccatgtggacattcagccttaagttcattaaagcatgcattatttgtcttagttactcaactcactaagtgcatttcttatactaaagattattartagcttcaaactgttgcattccagaaggagtagctcttggatttcaccagcattttttctgaagcatttattgtgcttgtggaaatacgtatgcattgtt

SEQ ID NO: 42405 - DNA, 201 bp, Homo sapiens
gagctgaatcagcctggcttgggaggcatcctgtccttgggagggtcctctggaggtcacttcagcggcagtggatgctgacagccttggaccttggacakctgagccaagagggcagaccaaaaagacaagtttcccgcaggaggcccatgtggacattcagccttaagttcattaaagcatgcattatttgtcttagtt

SEQ ID NO: 42406 - DNA, 201 bp, Homo sapiens
cagtataactaggtgtaattattgacaccatttatagtcatttatcagcattgttaacactctgttcattttgtgacttgaatgtaattattcactgttgrcgtttaatttttttttaaacaaagcattatcccaccatcaagggttcccttcattgagagggtcttagtcagaacactgtgctgttttaatgtgtttctg

SEQ ID NO: 42407 - DNA, 201 bp, Homo sapiens
acaagactcacgaaataaatactgattgctaattgctctgacgaaaagaccgctggattgagagcaaggagaactgcattttcgttctgtcttggacacarctaaccctggccttagtttcttcatatgcaatatggagaatttggccatgtgaattttaaggaatcacacagctctttaagcctgcaatggggcaggacc

SEQ ID NO: 42408 - DNA, 201 bp, Homo sapiens
gtccacacctcagctattgtgaacaatgctgctatgaacatgggtgtgaaaatatttctttgagagcctgcttttaattgttctggaggtacacccagaartagaattgtgggatcatgtggtaattctatttttagttatttgagaaacctccatgctgttttccacagtggccacaccctttacattcctgccacagcg

SEQ ID NO: 42409 - DNA, 201 bp, Homo sapiens
gcaagtcaagattcctgtagttgacattttaaccagcgacttgtctgaaagtagaatctgataaatccaggactgagggaactccaggggaggggtggccsaggttctcactgacaggctcagaattcagaaacttcccaaggctctcaagttagcctgaaatcaaccactgaaagttataataggaaagaaaatcaatct

SEQ ID NO: 42410 - DNA, 201 bp, Homo sapiens
attcattaatttattcatatattaaacacacatttttgggctgcttaccagctccccaggcactgcagtttttactgctgagtcagatacacgtgaaaggygaataaaacaggtcgcagcctcaaggtgtcttgtggtccaactggggacatgtgtgaatcagatcgggaccaaaaacagtgccctatgcccctccactag

SEQ ID NO: 42411 - DNA, 201 bp, Homo sapiens
ttgggtatgtctttattagcagtgtgagaacagactaatacaggtggcacggagcagagatggcacgagatagaagaatggctcctgacttcagagtgaaygagagagatgtaagattaggttgcctggtagcatgatccatgtacagcagccttcagagtaacggggatgcagctttacatccattacgtaaagaaggaa

SEQ ID NO: 42412 - DNA, 201 bp, Homo sapiens
aatcacaggctctaagggtgatatggggcctccaggagttccaggatttcaaggtaagacagcacagaccttgctgcacagcctttgcagcagcagatgcygtgtgaagagcttgctaacctcgggcaccttagcactgatagcaccgctgccattatagcacgagatactgttctcttcaaattaaaaatggcacttctg

SEQ ID NO: 42413 - DNA, 201 bp, Homo sapiens
tgctttccagaacattgaggggctgtttccattttccaactagcaggttactggagagacttaacctacatatcctgagcaattcccaacctcctctttgygtgtctagggtattggtggctctccaggaatcacaggctctaagggtgatatggggcctccaggagttccaggatttcaaggtaagacagcacagacctt

SEQ ID NO: 42414 - DNA, 201 bp, Homo sapiens
tgattttctaattttggacaaattccaaaagataaagagaaaatgggtcaaaactcagtttttccagctacattcaatcctggtctggaaaacagatttawagactgttcagtccataaaatacgagcccctttgagagcagagacagctggaactggattggtccaagcctgatctgaggctcaccccgctggatcaggg

SEQ ID NO: 42415 - DNA, 201 bp, Homo sapiens
gcaccggcagcctctgtcccgactatttatgggaaaaaatatttttttgtaaatatgatcttgacaaaacattggctggcaggaaaatagctttcttttcrggggagcaaaatgagagtgtatattttaattcaagatcaaagacttaacataaaacaaaccctgacaaatgaaaactgggcaatgggattttcctcctgt

SEQ ID NO: 42416 - DNA, 201 bp, Homo sapiens
ccctggatggaataccgctgaactaaccccatcttctatagctaataaaagacaaataacaggattcaggcactaaccagagtacgactcagtttctactycttcagataagcagaccctaatctgagggagtcgggccagctgaagacacggctcagaatatccgaagtcttgagcaagttcctttcctcttactgactc

SEQ ID NO: 42417 - DNA, 201 bp, Homo sapiens
aaattgtgaacctgggtaacctgcattatttatgtaccccttttaaacacagtaatttacaacagtgaattaagacttgcattacctgacttttattttaattcaccatttgaagcttatacattacacctgagtgaagggggtactcaggtcatcctttgtattttttttttctttttagcagtgaaccattgaactgca

SEQ ID NO: 42418 - DNA, 201 bp, Homo sapiens
tgaaattgtgaacctgggtaacctgcattatttatgtaccccttttaaacacagtaatttacaacagtgaattaagacttgcattacctgacttttattttaattcaccatttgaagcttatacattacacctgagtgaagggggtactcaggtcatcctttgtattttttttttctttttagcagtgaaccattgaactg

SEQ ID NO: 42419 - DNA, 201 bp, Homo sapiens
atgaaattgtgaacctgggtaacctgcattatttatgtaccccttttaaacacagtaatttacaacagtgaattaagacttgcattacctgacttttattttaattcaccatttgaagcttatacattacacctgagtgaagggggtactcaggtcatcctttgtattttttttttctttttagcagtgaaccattgaact

SEQ ID NO: 42420 - DNA, 201 bp, Homo sapiens
aatgaaattgtgaacctgggtaacctgcattatttatgtaccccttttaaacacagtaatttacaacagtgaattaagacttgcattacctgacttttattttaattcaccatttgaagcttatacattacacctgagtgaagggggtactcaggtcatcctttgtattttttttttctttttagcagtgaaccattgaac

SEQ ID NO: 42421 - DNA, 201 bp, Homo sapiens
tcctctggaatggaattcactgtaatcttgagaagagcgccctcttggtctgtagatgcgagaaaaccagaaataggctttatttcttattaaaaccattracttctcttcctcccctttcttctttggcactcgtactgtgtattgtacaatctttgtgtattttaagaacttaatatactttataacgtgaatactgat

SEQ ID NO: 42422 - DNA, 201 bp, Homo sapiens
cacaatactaagtatatttttggaagttgaaaaatgttatgcaaatgtaagcttttaagaaatcattatttgtactacaacatttggcctatattttactrttttttaagtaatttttaaatgccatggacacttttttggggagctaattttattgaagtttatcaacttacagaaacatatcaaaggcgaagggtacag

SEQ ID NO: 42423 - DNA, 201 bp, Homo sapiens
gctgagtagtgtcccactgcatggatataacatgattggcttgtccagcccattcatgtgctgatggagtgaggctttcgtttagcagtgcagttgctgckgatgtctttaaacacaattcagatgcctttgccatagaacacgtctcgtgagaagtatgaaaacgatagctgggttcctagcattctgagctctttttcc

SEQ ID NO: 42424 - DNA, 201 bp, Homo sapiens
cgtggcttcataatccccccctcctgccctctccccattccccaagcaaccgtccatctgccttctggtcctctaggttagtttgcattttccagcagttkacaaaaataaaaccatacacttcgtagtcttttcagcctgactactctcccacgacataattcgtttgagatccagcccagtggttgctcacttctttct

SEQ ID NO: 42425 - DNA, 201 bp, Homo sapiens
tcccggctgcggctcagttgaccaggcagtggttaacgctggccattaagacggcaatcatgatgggagagatggccaggctattgatttccagtgtagayggggtctaaatcccagacttaggctagtcctgtaacactaatatatgccaactatcaaagagttttcagcttctttacatgaatgtcgatatttgcaact

SEQ ID NO: 42426 - DNA, 201 bp, Homo sapiens
cacagatcatttgtgctaaatgccgtggtggttctgagctgaaaggtacttaggaaaaagtactaaattaggaacattcagtcaagggtatcttataactrtaggaatatcattttattacaagggtgcaattaactaatatctatgtactccacaatatacgtagtattattgcagagttgatagtgctttgtgttgtac

SEQ ID NO: 42427 - DNA, 201 bp, Homo sapiens
aaacattcaattcttgtttactgccttaatttaaaaggaaaatatatacattcatggtaaaatgtacatatctttggactgtttaaatcattacgatgacrtttatataaaaatatttgatatgaaagggttaatttctttgagtttttcatctactatggatgagattaaaccttaaagtgatcagaatttatccactaa

SEQ ID NO: 42428 - DNA, 201 bp, Homo sapiens
atatcattgggaattctgtgcaagacagtgctttccctctgcttttaggtccaaaaggtcttcctggcctccagggaattaaaggtgatcaaggcgatcamggcgtcccgggagctaaaggtaggagagtttgttgatctgtggacaccttactggtgctttgtgaaaatgtaaaagccaggaatgcacagaattggggtg

SEQ ID NO: 42429 - DNA, 201 bp, Homo sapiens
aaaacattcaattcttgtttactgccttaatttaaaaggaaaatatatacattcatggtaaaatgtacatatctttggactgtttaaatcattacgatgaygtttatataaaaatatttgatatgaaagggttaatttctttgagtttttcatctactatggatgagattaaaccttaaagtgatcagaatttatccacta

SEQ ID NO: 42430 - DNA, 201 bp, Homo sapiens
tgagaatcccatttgcttatctccagacggcagcaggaaacaaatactcatttgcacagatcatttgtgctaaatgccgtggtggttctgagctgaaaggyacttaggaaaaagtactaaattaggaacattcagtcaagggtatcttataactgtaggaatatcattttattacaagggtgcaattaactaatatctatg

SEQ ID NO: 42431 - DNA, 201 bp, Homo sapiens
cctctagatatttctaaaatcttctggtattcatataagaaaaatcaaaacattcaattcttgtttactgccttaatttaaaaggaaaatatatacattcrtggtaaaatgtacatatctttggactgtttaaatcattacgatgacgtttatataaaaatatttgatatgaaagggttaatttctttgagtttttcatct

SEQ ID NO: 42432 - DNA, 201 bp, Homo sapiens
tctgagaatcccatttgcttatctccagacggcagcaggaaacaaatactcatttgcacagatcatttgtgctaaatgccgtggtggttctgagctgaaargtacttaggaaaaagtactaaattaggaacattcagtcaagggtatcttataactgtaggaatatcattttattacaagggtgcaattaactaatatcta

SEQ ID NO: 42433 - DNA, 201 bp, Homo sapiens
gaggaagtaaaatcctgtacattttaaatggtagatatatttagaatatagtggctaagatatttatgtcctctagatatttctaaaatcttctggtattyatataagaaaaatcaaaacattcaattcttgtttactgccttaatttaaaaggaaaatatatacattcatggtaaaatgtacatatctttggactgttta

SEQ ID NO: 42434 - DNA, 201 bp, Homo sapiens
tttctgaagggaagtcagaactgacctcaggaaaaccaggtgtgcttgggagggaacagctcccttaaaggatgtcagcaaagggccattttgtatggcarctagggtgctgtgagaggttatgcgggtgtctgatgtgacttttctctttgaggtcttcctgggactcctggccccacaggcccagctggccagaaaggg

SEQ ID NO: 42435 - DNA, 201 bp, Homo sapiens
acagcccgggcacatagagaacagtggccaggggatgggaggccccaaggagttcccatcacagacggggagcagggaggccagctgtcctgtctcccatyttcagatgggcaaactgagtctagtgcaggttacaggatctttctgaggtcttgtcactagcaggatctaggacctaaatctccaaactgtttttgtggc

SEQ ID NO: 42436 - DNA, 201 bp, Homo sapiens
agtcaggctggtaaatgtcacaatcaggggaatcgaagggctataggaacactgaatccagctttggggaactcagaggaaacttctgggaggggcttccrcctctgaaatatgagggagaaataggaactatacaccagcatgtcatttccatgtgcactgtgatggtgtactatacacagaagacatggtcattctgcc

SEQ ID NO: 42437 - DNA, 201 bp, Homo sapiens
gtccatgtctagaacctagctttgcctttgatcataataatcatagaattaaggtggtgcatggaaattagagcaaaactagccctagtcctaagtactgygacaaggcagtggtggtgcttagggtggccttgctgactctcaatgacaggaaaggggagtgcttttcttttagaacaagagccatttgattatcctgat

SEQ ID NO: 42438 - DNA, 201 bp, Homo sapiens
cagctttggggaactcagaggaaacttctgggaggggcttccgcctctgaaatatgagggagaaataggaactatacaccagcatgtcatttccatgtgcrctgtgatggtgtactatacacagaagacatggtcattctgcctgtctgctctcaagtctaagggtctttgcactgaaagatgaccttcaagtttgctcct

SEQ ID NO: 42439 - DNA, 201 bp, Homo sapiens
gcccctaccgagtatatttgatatgtatttgttgaacgaacgatgcaaatcttagaggcctagagctcgtggctttccgttgctggggccattcgtgtgcrtgggtctcctaggccgggagacgtgccactgctcctgtacagcttactctcaatttttcttctccaggtgaaccgggacctcctggattgccaggctccg

SEQ ID NO: 42440 - DNA, 201 bp, Homo sapiens
gataccaaaatgtcattgtttctgtgattaacaatcttggtggctgaactttgctctcagaggggtggaaagaattggaagggcagggtttaggagaccartgttaaaaaagagctcccagctccaactgaggccccagtatgtggtcctgtcccttttctcggaggtggcaggtaggcaggcaggggatgtttggaaagt

SEQ ID NO: 42441 - DNA, 201 bp, Homo sapiens
gcttcaggggatcagaggtaacttcatgcagatcagtctggagggtttcgaggacaggatgtgcttatttttgcattcccagagcccctaccgagtatatytgatatgtatttgttgaacgaacgatgcaaatcttagaggcctagagctcgtggctttccgttgctggggccattcgtgtgcatgggtctcctaggccgg

SEQ ID NO: 42442 - DNA, 201 bp, Homo sapiens
tgactatctggattttaaaaaatccagcctaaattgcaattcttgctctgccattcagtagcattgtaatctctttgagcttggagtctctaatacatacrgtgagggtagtcgccatgtctagggagagcatgtgcacatgaagtaagcactcgagaggtgctggttgtggttgctgccacatggcttggagttacattg

SEQ ID NO: 42443 - DNA, 201 bp, Homo sapiens
ttatatgtttatatgatacatacatataattatatgtataatacatacatacttataattatatgtataatacatatatacatattatatgtatatatacwtataattatatgtatatatacatattatatgtatatatacatatatacatttgtatataattgtatatataatatatacaattatacatatataatacat

SEQ ID NO: 42444 - DNA, 201 bp, Homo sapiens
ataattatatgtttatatgatacatacatataattatatgtataatacatacatacttataattatatgtataatacatatatacatattatatgtatatytacatataattatatgtatatatacatattatatgtatatatacatatatacatttgtatataattgtatatataatatatacaattatacatatataat

SEQ ID NO: 42445 - DNA, 201 bp, Homo sapiens
atgtaatacatacttataattatatgtttatatgatacatacatataattatatgtataatacatacatacttataattatatgtataatacatatatacwtattatatgtatatatacatataattatatgtatatatacatattatatgtatatatacatatatacatttgtatataattgtatatataatatatacaa

SEQ ID NO: 42446 - DNA, 201 bp, Homo sapiens
ataattatatgtgtatgtaatacatacatacacatataattatacgtatatgtaatacatacatacacatataattatacgtatatgtaatacatacataygtataattatatgcatatgtaatacatacatacgtataattatatgtatatgtaatacatatatacttataattatatgtatatgtaatacgtataatta

SEQ ID NO: 42447 - DNA, 201 bp, Homo sapiens
acgtataattatacgtatatgtaatacatacgtataattatatgtgtatgtaatacatacatacacatataattatacgtatatgtaatacatacatacayatataattatacgtatatgtaatacatacatacgtataattatatgcatatgtaatacatacatacgtataattatatgtatatgtaatacatatatact

SEQ ID NO: 42448 - DNA, 201 bp, Homo sapiens
cacatacatatatacgtataattatacgtatatataatacatacatatgtataattatacatatatacgtataattatacgtatatataatacatacataygtataattatatgtatatgtaatacatacatacgtataattatacgtatatgtaatacatacgtataattatatgtgtatgtaatacatacatacacata

SEQ ID NO: 42449 - DNA, 201 bp, Homo sapiens
aggaatattcaacctgtagcgcatttcttttacaaaccttctcctactccaattaatcatgttgatgggcatgaagacagcacattatactttatatatayacacacacacatacatatatacgtataattatacgtatatataatacatacatatgtataattatacatatatacgtataattatacgtatatataatac

SEQ ID NO: 42450 - DNA, 201 bp, Homo sapiens
tacaggtgccctccaccgcacccagctaattttttgtatttttagtagagacgaggtttcaccgtggtctccatctcctgacctcgtgatctgcctgcctyggcctcccaaagtgctgggattacaggcgtgagccaccgcgcccggcccactttgaccatttttaagtgtagagttcaccggctgtgagtacagtcatac

SEQ ID NO: 42451 - DNA, 201 bp, Homo sapiens
tggcctttttttttttttttttttttttttttgagacggagtctcgctctgtcacccaggctggagcgcagtggcgcgatctcagctcactgcaagctccrcttctcgggttcacgccattctcctgcctcagcctcccgagtagctgggactacaggtgccctccaccgcacccagctaattttttgtatttttagtaga

SEQ ID NO: 42452 - DNA, 201 bp, Homo sapiens
ccaggagtttgaggttgcactgagctacaactacagcactgcactccagcctgggcaacagagcgagatcccatatgccaaaattttaaaataataataaraataatacgcagcttgctcattttaatgcatctttcaaagtgggtctgtaagggcgtggtggggctcagtttatcttagtaatctgttttgtgcttgaca

SEQ ID NO: 42453 - DNA, 201 bp, Homo sapiens
atgggaatgaaagatttaatttatgattaaaaataccatgctttttcaagcatccccttgatggagtttgttccattttgagaatttccttctgggacaartagggaagttaccactgcccactaatgtccaaatcctccctctctggaaatatcatttgcagacaggggacaccggtggagccctgtgatttcatggcca

SEQ ID NO: 42454 - DNA, 201 bp, Homo sapiens
tccttcagtgacagatcctgtgggatcttgaaaagtgggcctgccttatagacccctggggtctgcatttctaatgaagtgatggtggtgacctgcccccscaaccacaccttgagtagatgaataaagtgcccttctcacctgcaggcgccaaggggtatatttgttttgtttggggagagtaggatgggaaagaaaagt

SEQ ID NO: 42455 - DNA, 201 bp, Homo sapiens
gtagcattgtaatctctttgagcttggagtctctaatacatacggtgagggtagtcgccatgtctagggagagcatgtgcacatgaagtaagcactcgagmggtgctggttgtggttgctgccacatggcttggagttacattgtcatttgtgtcttggttccaacacttgccaggacataacttctttttaaagcatccc

SEQ ID NO: 42456 - DNA, 201 bp, Homo sapiens
taattacttgtaattggttccaattttctagctgccattctcttgggagccccctccccacccccggagtgtcctagagggagctgcctgctggcttacastgtccacccctgtggtattactagtgaacacaaagatgaatctgggcaaacgaaggtgtttccccttaatttggaatttggagtagatattccaccacag

SEQ ID NO: 42457 - DNA, 201 bp, Homo sapiens
ttacctgataaaggagagctattcaacctcctcatcttctgttgctcttagaatcagtacattgttcagttgtaaaattaccattgtttagtaatacatayacatacacatcttagtgtactgtggccactgattccagcaaggaccacagccagagatactggccgtgagctggaagcatccagtttgatgtcagttgct

SEQ ID NO: 42458 - DNA, 201 bp, Homo sapiens
accctggcatctgtaatcccagctacttgggaggctgaggcaggagaattgcttgaatccaggaggcggaggttgcaatgagctgagatcgtgccattgcrttccagcctggatgacagagcaagacactgtctcaaaaacaaacaaacaaacaaacaaaacacacacacacacacacacacagtccagttcctaagcatt

SEQ ID NO: 42459 - DNA, 201 bp, Homo sapiens
attgttcagttgtaaaattaccattgtttagtaatacatacacatacacatcttagtgtactgtggccactgattccagcaaggaccacagccagagatamtggccgtgagctggaagcatccagtttgatgtcagttgctctattttcatttcaccaaatacaccaacaattggggaagccatttgtgtattcactcata

SEQ ID NO: 42460 - DNA, 201 bp, Homo sapiens
aggccagccaggagccaagggggagcctggtgagttttatttcgacttgcggctcaaaggtgacaaaggagacccaggctttccaggacagcccggcatgmcagggagagcgggttctcctggaagagatggccatccgggtcttcctggccccaagggctcgccggtatgtttatctccagactttgaatgtgcatttta

SEQ ID NO: 42461 - DNA, 201 bp, Homo sapiens
gacacatacacaaacccggtccagaatcaataatattaactggaaaaggggatgacacggtttttattacgtaggatatgtagtgggcgatcttcttgaawgatttctcattcctagcttatctttaacaaacatgtttttcatgtaaacattatgctagcgccagatgctttttatcaattgttaaagcctgtctagtct

SEQ ID NO: 42462 - DNA, 201 bp, Homo sapiens
ctaagaaccttctgcaaggaagtttatgaaaaaaaattcacattaagtgaattgtgccagagttaaaattctgccaagtcgacagggagtctgaagatgcytttctcaggcctaagtgaacaagtcaatgggacaattgttggaaacattttctgtttttcttgtgaaacccaagtctcaggatgctggaggagaagccat

SEQ ID NO: 42463 - DNA, 201 bp, Homo sapiens
aggaaatatgcaggtggttggaattgttcttatactttgcattcggacatgtgcctgagttaaagtgagaataattttggtaatggtatgatagatgttaygttgaaaatttagcacttgcactgttctcttctggctccaaatcttttcatttaagttctgagactgcaaaaggcatcagtttcagactctggagtcaga

SEQ ID NO: 42464 - DNA, 201 bp, Homo sapiens
agcccacaagaaaggccgcatagaggaggctaattttagctgggattgaaggatgcataggagctaatattaactcaagagaaacagtttaaaaatcccamaacacctttcaagtaaataacaaattttccatgactctctgctacaatttctggcaggtggctcatagaaataatttgttgcctttcctgggacccagag

SEQ ID NO: 42465 - DNA, 201 bp, Homo sapiens
agcctgacattttccatggtagaaaatgtctctggggctccagaggtggggcttccagccatgtaaatatttgcatgtaaatattttagaattcagcatargttgaggtcagaaagccatttaccgtgaggctgggtgcggtggctcatgcctgtaatcccagcactttaagaggacgaggcgggtggatcacctgaggtc

SEQ ID NO: 42466 - DNA, 201 bp, Homo sapiens
tgtgtaagacagaaatgatgcatggaaaagtttcagccagcatcttagaattctgacagccacatacactgcaggacctgaaatggaagcgatcttgggcrtcatcacaggggtgccactgatctgagtcagtgtacagtttgggttttaatgagtctgtctgctctagttaccaggcgctcagtactttgtgagatgggc

SEQ ID NO: 42467 - DNA, 201 bp, Homo sapiens
atgtctctggggctccagaggtggggcttccagccatgtaaatatttgcatgtaaatattttagaattcagcataggttgaggtcagaaagccatttaccrtgaggctgggtgcggtggctcatgcctgtaatcccagcactttaagaggacgaggcgggtggatcacctgaggtcaggagttcgagaccagcctgaccaa

SEQ ID NO: 42468 - DNA, 201 bp, Homo sapiens
cgtatgattttttcccacatacttaccggctttggagccaagtgggggtgggcagagttagggcgtaggttccttttatttggaaccctcttcacaatctmttcctagaataagcatcttccggaacttagttgatgatctgggtgggaaaggtggagacagccctgaaagtcagagttttgccccttctccctttccgag

SEQ ID NO: 42469 - DNA, 201 bp, Homo sapiens
taaaatgattatttctaggacattatggcttttgtatattaagtgtgctcaatgaacagaactgtaatctaacttcacaaaattagattttaaatacatawaaacatatgtacacatatacactacataagtagaccatgtgtgcatttcctataaaatgaatgatattcattcattcatgtaagaaatatttattgtaca

SEQ ID NO: 42470 - DNA, 201 bp, Homo sapiens
aacagaaaagaattgctgccctcagcatttatttatgggatgaatacagagaagcaaacaatttctgccttttatcatgctgaactagaaattatttaaarggatatccctctctgctattttagggatggttcaacctcccaaattcaactttgttaaaatagttgtaaggaagagactggagtcctttataggaaattg

SEQ ID NO: 42471 - DNA, 201 bp, Homo sapiens
aaaccaagtcatcaaacaaggtgtgggatctttttaggcattctggttctagctggggtgggcgagctggagagttgaccttggttaatatattcaagccygagggagggccccacagccccactccacaccctggggcccttctatagtctgggactcagggcgtccaggtgacagctgaacagagactgcccatgactt

SEQ ID NO: 42472 - DNA, 201 bp, Homo sapiens
ttctccatgcagcctcctgcaccaccactctctcaagccctgcgtccggcctcagctctcccaggggcacatggtcttacccttacagagttacagtggcygaacctgacctgatatgttcacacctaatggctactctgacttcaaacccttttacagaaccatcttgtgtgtccttagttgtgattttctgctctttct

SEQ ID NO: 42473 - DNA, 201 bp, Homo sapiens
tccttcattttcctctccattagacatgctgcccctcattcaccactcaggaagggcacacagtattttgtggaagcccacaggggccgcccctcggggcycttggctgccttggagcacgttgtgcttgtggcttttctccccagtgacaggctggatgtctcaggctctgtgcccctttggtcagcgctcttccctctc

SEQ ID NO: 42474 - DNA, 201 bp, Homo sapiens
aacccttagtggtctcttaacccagacgcttgataaaaagccattgaagttgctctggctggaggagttacccacgtccccctcccaaagtcgctgcgctsctctctgtccagtcctgccctgggctcgcctgtggccttgaccattgcctctgcccgcccccagctccctgaccgtcctcctcaccctgagggtctggtt

SEQ ID NO: 42475 - DNA, 201 bp, Homo sapiens
ttgagcatacatttctagagtcaaggaattagtataccctaggctcacagggatgagagatgtgggttctttcagtgaagtaatttaggggctgctctttraagcataaacatggagtccactttgtttaagacgatggtgccagctgcaccaatgtcgaagggctaacgaggagccaggcaggaccagagtcaccaggag

SEQ ID NO: 42476 - DNA, 201 bp, Homo sapiens
acttttatgaaaaggtgcgatgtacttgggggcagtcagggctctgcacaattagtgaaggccattgcattttcagcacttgacatggggtgggtgataargaaactgacaagtctagtccctgccacgtggccagcctcgcagggctgagaaggcgatgggagagggctgacttgtggtctgatttgcccaggccagcga

SEQ ID NO: 42477 - DNA, 201 bp, Homo sapiens
ctaatggcgctcccgtgcacccctagcacatcccgacatggaagatgagttctgtggacagccagctgtgaggagatggcatggttaaagctccctcgccrttgcctcctagttgcagaaaaatatggcagattcttggttgctgagaaatgctgaagaaatgaaaagacaagatcaagagtttagatgaatttagtgcaa

SEQ ID NO: 42478 - DNA, 201 bp, Homo sapiens
aataatcactgcataaaatgaatttaaatggactttggtgaggatgtactattttttttttgtttgtttgttttttgttttttgtttttttgtcagggatwtgaagggattctggttgagctgaagcaggcaggagttatgctctggaaaaggagtataacagttacatgtctctcaatattcttgagcatacatttctag

SEQ ID NO: 42479 - DNA, 201 bp, Homo sapiens
gcatgtcaaaattaccgaacatgaaacaggactcttctgtttagaatagcaccgagtcacctttggaaggagtgacgcccctgcgagggtgctgtgccccycggcagcatcctttcagccaacccttcccttcacgccccttttcagaagcagaccctctatttttacttcccaggggccttaaaacccacctgcttgtcc

SEQ ID NO: 42480 - DNA, 201 bp, Homo sapiens
atgggctcccgggtcctcctggttcccctgggccccctgggcagcctggctacacaagtgagttccctcagaaatggtttaatgtggggtgcaagcagacrccagggtgccgggcagacccaggttgggggctgtgatagtcccccacagccagagtgtaatagaaaggcgtggattcttctaatcatccatattcctcta

SEQ ID NO: 42481 - DNA, 201 bp, Homo sapiens
atgtcaaaattaccgaacatgaaacaggactcttctgtttagaatagcaccgagtcacctttggaaggagtgacgcccctgcgagggtgctgtgcccccckgcagcatcctttcagccaacccttcccttcacgccccttttcagaagcagaccctctatttttacttcccaggggccttaaaacccacctgcttgtcctc

SEQ ID NO: 42482 - DNA, 201 bp, Homo sapiens
ttctgtttagaatagcaccgagtcacctttggaaggagtgacgcccctgcgagggtgctgtgccccccggcagcatcctttcagccaacccttcccttcamgccccttttcagaagcagaccctctatttttacttcccaggggccttaaaacccacctgcttgtcctccatgaggatgtgggtgaagcgctgaccctcat

SEQ ID NO: 42483 - DNA, 201 bp, Homo sapiens
tatgcgcagatgcacgtgtgtccacgtgtgtgcgtgtgcacctgtggtattctcccaggtcccagagctgacccgataagcgtctgatggaaacgctcacstgccctagcattggcacacaacggagtgttcgcagcctttacgctttttgctttgtttttgatgtttacatttatttttgtttttatccccgtttattat

SEQ ID NO: 42484 - DNA, 201 bp, Homo sapiens
tggaaggagtgacgcccctgcgagggtgctgtgccccccggcagcatcctttcagccaacccttcccttcacgccccttttcagaagcagaccctctattwttacttcccaggggccttaaaacccacctgcttgtcctccatgaggatgtgggtgaagcgctgaccctcattccgtctctgggatctgtccactgggggc

SEQ ID NO: 42485 - DNA, 201 bp, Homo sapiens
ttagccctgaaggtggctgtgggtattctctatgcgcttttggactttaacccaaaatacagatagcgtaatttgcagtgtaacgtctaacatgttgaacyctttacatattctgtgaaggacgaacctgcaagggcaccgacttggagtatctcatccgttgtcttgggtgaggaaacactgacaactgaccaagaaatc

SEQ ID NO: 42486 - DNA, 201 bp, Homo sapiens
aatgattttctaatttgttgtacggagtttagtgtttattatttttattatattttgataatttctgcacatctttaaatcactgaaaatgaaaaggtttscacatgaatgagaatattagcaacatatttgactcctttttttttttgaaatggagtcttgctctgttgcccaggctggagtgcagtggtgcgatcttgg

SEQ ID NO: 42487 - DNA, 201 bp, Homo sapiens
tgctgatccagccacagccccccgagggtgggtgacacccggtgacaggaggctcagatgctggtgtcctgatggaggtcagatctgggcctggcggtgcygtgtgctttgggggtttctgggcttcgtgtttttgggtctgattagacccattgagtggcttccatgaccctcggctgggaggaagccatctggtcccct

SEQ ID NO: 42488 - DNA, 201 bp, Homo sapiens
gggcatggtggtgtgcacctgtagtccaagctattcaggaggctgaggcaggacaactgcttgaacccaggaggcacaggctgcagtgagcagagatcgcrccactgcactccagcctgggtgacagagcaagactctgtctcaaaaaaaaaaaagaaaaaaaaagaaaaagaaaagaaaacaaatatctctttaagctcc

SEQ ID NO: 42489 - DNA, 201 bp, Homo sapiens
agagaccacaggctgagtccaggtttccctagaagggaaccatggactagagacagggcagtttgagcatcaataacaacaatgaccatgagggtcagaawcaaccaacaagaaatgcccagcaggtgctgctcccagtgcggccaaatactcagcaggtgctgctctcagtgttgctgggtaaggattcgcctctgcagg

SEQ ID NO: 42490 - DNA, 201 bp, Homo sapiens
agaatgccacagggccctgggattgggagtccgcagcccggccagttctccagccaaagcaaacagggtaatgctgctgaccggaccatcccagctgatamaggctgctctgtatctcattaattaagatctggaagcagagcagagcccatgagaggctggctgggggcgggggacgacatggaaattcccaggactgac

SEQ ID NO: 42491 - DNA, 201 bp, Homo sapiens
gccacagggccctgggattgggagtccgcagcccggccagttctccagccaaagcaaacagggtaatgctgctgaccggaccatcccagctgataaaggcwgctctgtatctcattaattaagatctggaagcagagcagagcccatgagaggctggctgggggcgggggacgacatggaaattcccaggactgacccggc

SEQ ID NO: 42492 - DNA, 201 bp, Homo sapiens
gggccctgggattgggagtccgcagcccggccagttctccagccaaagcaaacagggtaatgctgctgaccggaccatcccagctgataaaggctgctctktatctcattaattaagatctggaagcagagcagagcccatgagaggctggctgggggcgggggacgacatggaaattcccaggactgacccggcagctcc

SEQ ID NO: 42493 - DNA, 201 bp, Homo sapiens
gatgggaccggtggggcctgggccctggctgactccggcctgtgactcccaccctggagcatgcccttcctcttgctgccaaatgctgatgggtttgtctycggtcccagagcaccaagctatggatcatcatggagtacctgggcggcggctcagcactggacttggtgaggcataggccatggcagtggggggtcatgc

SEQ ID NO: 42494 - DNA, 201 bp, Homo sapiens
aagcgctggaagtcagaggggcatggcgaggagtccagctctgaggactctgacatgtagggacctggtttatcctcatggtgaccctaggtgctgtgacrtgggtggtccccactccagaagcaggggcgtgggccctgggggtgagggtgaccagatatagtgttgggcagggaccccctcaaggctgcaggacagggc

SEQ ID NO: 42495 - DNA, 201 bp, Homo sapiens
ggtccccggctcattgctgcatggctccaacgtccgcctctcccaccatgtggcctcctcctggtgtctctgtgtccaaatctcccgctctgtctaaggayaacagtcactggtcatgggacccatcctaatccagggtgacctcgtattaacctcatcacatctgcaaagactatttccaagtcaagccacactcccagc

SEQ ID NO: 42496 - DNA, 201 bp, Homo sapiens
ttggggaggtctacaagggcatcgataaccacacaaaggaggtggtggccatcaagatcatcgacctggaggaggccgaggatgagatcgaggacatccascaggagatcactgtcctcagtcagtgcgacagcccctacatcacccgctactttggctcctacctaaaggtgcctgttgtggggaggcggggaccctgct

SEQ ID NO: 42497 - DNA, 201 bp, Homo sapiens
cgtgtcaatctgatttgtgttccttctttacctcatagcctttctctccccctcctcctcctccctccctcccgcattagtttcctgacacgaacctggcrgcttaggacaacacacacttactctctcacagttcctgaggctggaagtccagaagtcggggtgctggcaggacgtgctcttctgaagcctccagggcag

SEQ ID NO: 42498 - DNA, 201 bp, Homo sapiens
ggcgcggccatggctcacctccggggatttgccaaccaggtgagaagggtgcaggtcaggaagactagcggcctctcaccgaggggctccagagtctcctrggggttcagaggggagcgccacgccggagcgggcagtggggtgagggaaggagcgcgcgtcgtgcgaccagcggagccgtcctgaggtgggcgcagggcg

SEQ ID NO: 42499 - DNA, 201 bp, Homo sapiens
cgtcgtgcgaccagcggagccgtcctgaggtgggcgcagggcggccccggggctctgccgtgtgcctgtggcgttttgcgtggcagaagctcgcaggcctytagaaaccgagcccctggtggctccgcctgtgcgagggcggtggaggtgcgtgaagagacaccggcgcagggacggggcgctgcccccagcgcggggcgg

SEQ ID NO: 42500 - DNA, 201 bp, Homo sapiens
ttctgcttgggctgatgagccctggctctggcttaggggtccgctgtgctcccctgctgtgaagcagtagaggtctgagtgcccacccaggggtttccctwccggggctgctgtgatggagcagattcagctccaggccctgtgtggagagcagcatggcctcagcagggagcagggagtagagcagggcgggaggacgcg

SEQ ID NO: 42501 - DNA, 201 bp, Homo sapiens
ctctctcaggccaccttagacaggagtagatgggaggacacaagctcagggcaccaacagacctctggaatccccaggaggactcccttggggtctttccrggtgcttgggcagggttgggttgaggctgaggccaggcctacaggctaacggctcggtggagcagcgtcccagggccccgagtaagcgttgatgggctga

SEQ ID NO: 42502 - DNA, 201 bp, Homo sapiens
ctcaagagattctcctgcctcagcctccctagtagctgggattacaggcgtgtgccaccatgtccagctaatttttgtgtttttagtagagatggggtttyaccatgttggccaggctggtctcgaactcctgtcctcaagtgatctgcccacctttgcctcccaaagtgctgggattacaggtgtgagccacccggccca

SEQ ID NO: 42503 - DNA, 201 bp, Homo sapiens
ggcgctgctaggagcactctggggggcccctactggcagtggtgagtgggcctgtgaggagcaggtggctggtggtgccagtgtctggggtgtagggaacrctgtggccatcctgcccaggagggtgatgggtgtgtcgggtcacatgcttgccagccatgccctcttcccagccctgtaggactggatcagcagcctggt

SEQ ID NO: 42504 - DNA, 201 bp, Homo sapiens
ctgaggccttggttttacctctggactgctatgaacagcagctttatcagtacttaagtccaacagaagcatgttaaaaacctagagtgacattccaggcrccaagtaaagtgagttccctttccctgtgcacaataaagtcagtgttcagtaaccaaccatccacaaacccatccaacagccagaagagagaagatacct

SEQ ID NO: 42505 - DNA, 201 bp, Homo sapiens
cgcttgaaccctggaggtgcaggttatagtgagccaagattgtatcactgcactccagcctgagtgacagagggagacgccatctccaaaaaaaaaaaaaacaaagcattgctgttttttggaaatgctggaagcattgctcagcccttcctttccagggcccagaaaacttgcctccaccaccatgagtagaaatgggag

SEQ ID NO: 42506 - DNA, 201 bp, Homo sapiens
gtgaacccaggaggcggagtttgcagtgagccgagatcgtgcctgggcactccagcctgggacacagagcaagactccatctaaaaaaaaaaaaaaaaaaaccaaaaaagtaaaaaaacaaattctagggagattaattaaatgagaaaactgaaaccattaaaaggtgccaatataatattggcatggggaagaacttcc

SEQ ID NO: 42507 - DNA, 201 bp, Homo sapiens
ctggagtggagtggtgccatctcagctcactgcaacgtctgcctcccgggtttgagcgatttcacctgcctcagcctcccaagtagctaggaccacaggcktgtgccaccatgcccggctttttgtttgtttatttgttttttgagacagtatctcattctgttgcccagactggaatgactgctcaccacaacctccacc

SEQ ID NO: 42508 - DNA, 201 bp, Homo sapiens
gacgtggggtgaggtccagtgctcactcgtgggtgtggctgcatttggcactacatgggctcgcttcactctgggaaggcgcggcgtggcatcctcttccttgtttggacccagctcacagggccatggagactttggggctggagagagtgggcagggcctttccagtctaagggtctgaggcagtgtctcagggtcccg

SEQ ID NO: 42509 - DNA, 201 bp, Homo sapiens
ggacgtggggtgaggtccagtgctcactcgtgggtgtggctgcatttggcactacatgggctcgcttcactctgggaaggcgcggcgtggcatcctcttccttgtttggacccagctcacagggccatggagactttggggctggagagagtgggcagggcctttccagtctaagggtctgaggcagtgtctcagggtccc

SEQ ID NO: 42510 - DNA, 201 bp, Homo sapiens
tggacgtggggtgaggtccagtgctcactcgtgggtgtggctgcatttggcactacatgggctcgcttcactctgggaaggcgcggcgtggcatcctcttccttgtttggacccagctcacagggccatggagactttggggctggagagagtgggcagggcctttccagtctaagggtctgaggcagtgtctcagggtcc

SEQ ID NO: 42511 - DNA, 201 bp, Homo sapiens
ttggaaggtgccctgtgctatgtcgtgcctgcagggacacgtcggatcccgtgggcctcacatgccaggtcaccaggtcaccgtctccttccacccctgcrgtgtgctgttgtgcacgtcagggacgctgttctctatgcccactgccctcctccctctcctggcccagcagtattgctcacgggggctccagccgccggc

SEQ ID NO: 42512 - DNA, 201 bp, Homo sapiens
tctcggggaccccaaaaggaggtcttttccccaggcagttcagcatctcccaggaaggcccctgaggtctcctgcttggggttgggggtccctgtctagcyaatggcagcctgagccgagtgcaggaagggttccaggggccacaagtcaggaggcagcccctcctccaccttctccccagaccttagccatcccgtgtcc

SEQ ID NO: 42513 - DNA, 201 bp, Homo sapiens
agagcttggaccagaagggttttgtataaactcagatgagtgctaagtaaacagccgggaacccgcacggctggagagtttgtccactagcctggcagccrggcaagggcaagtgaccacaggccaagcaggggccacagtctcctgcttttagcaccccccatgcaccgacccccttccctccctggcagggtctggaag

SEQ ID NO: 42514 - DNA, 201 bp, Homo sapiens
gagcccctcctgcctctgcagcctcctctcccgctcctcgaagattactttccttcttcctggaacattcttcccccatcttcaaactctgccacccggcrtttcctcagagaacgccccccaccccaccccacgggtcacccccactccaggttcaagtggccgaggtgaatactgggtgggcagggcaggaagtgggcg

SEQ ID NO: 42515 - DNA, 201 bp, Homo sapiens
ggtctgttctgagcccagcccctaaggggtactgagctgtcagtatgtgcaggggcgtggatggtatgagtgggccggacagggtgtggaccggcatggcrcggcgtggagaggccagagggactgggtggggccgaacacaagcggctcgcaggaagcctctggagtgcagggcgtgctgcgggtgcaagagacaggctg

SEQ ID NO: 42516 - DNA, 201 bp, Homo sapiens
ctttagagggtctgttctgagcccagcccctaaggggtactgagctgtcagtatgtgcaggggcgtggatggtatgagtgggccggacagggtgtggaccrgcatggcgcggcgtggagaggccagagggactgggtggggccgaacacaagcggctcgcaggaagcctctggagtgcagggcgtgctgcgggtgcaagag

SEQ ID NO: 42517 - DNA, 201 bp, Homo sapiens
ggtgggtcctgcctggccctaccactccggcctcattctttagagggtctgttctgagcccagcccctaaggggtactgagctgtcagtatgtgcaggggygtggatggtatgagtgggccggacagggtgtggaccggcatggcgcggcgtggagaggccagagggactgggtggggccgaacacaagcggctcgcagga

SEQ ID NO: 42518 - DNA, 201 bp, Homo sapiens
tctcgcccaaggagtcactgcaagactgggcatggccagactgtaaaccttggggtctaactccatggttcctgaagtacctctgtcaggggaagagcctrtacttgcaggcaggagaccaggaagctcacacctgcaaccttcccgctgtgtagcctcaggcaacttcctgccccattcacaggctcagtttcctcctgt

SEQ ID NO: 42519 - DNA, 201 bp, Homo sapiens
cggctcactgcaaccccgcctcctgggctccagcgattctcctgcctcagcctcccgagtagctgggactacaggcacctgacaccacgcccggctaattrtttgtatttttggtagagagggggtttcaccatgttggccaggatggtctcgatctcttgacctcgtgatctacctgccttggcatcacaaagttctggg

SEQ ID NO: 42520 - DNA, 201 bp, Homo sapiens
tccttgatgatgcaaagctgccagagcatcccagggacacccccaggggctctgacacctgctgtcagagtcactttccccaaaaggaccttctcctgtascccccaatgttgtcctcagctcccccacttctcttgatccaccaggcttcatggccaagatgggtgggcccactgtgtgactgggggtcccctgggggag

SEQ ID NO: 42521 - DNA, 201 bp, Homo sapiens
acggagatgtctccctcacagcactgtggggtggtttcagcttctagctttcctgcagctgattgtgggctgggttttctgagtggaaggagcagaatctrctgcaatgactccttttgtactcccagacctgccaaggttctctgggttcctagggtgacttttttttcttcaggtgcaaacacagatgatccttctata

SEQ ID NO: 42522 - DNA, 201 bp, Homo sapiens
gaatcgcttgaacctgggaggcggaggttgcagtgagccgagatcacgccactgcactccagcctgggcaacagagtgagactctatctcaaaaaaaaaaagaaaaagaagaggggctgcttcttaaccttgtcctgcacctggcatccaggactgggctaggaacgggtggtcctccaccagaaatggagcaaacaggga

SEQ ID NO: 42523 - DNA, 201 bp, Homo sapiens
gggcatgatggcgggtgcctgtaagtccggctactcgggaggctgaggtggaagaatcgcttgaacctgggaggcggaggttgcagtgagccgagatcacrccactgcactccagcctgggcaacagagtgagactctatctcaaaaaaaaaaagaaaaagaagaggggctgcttcttaaccttgtcctgcacctggcatc

SEQ ID NO: 42524 - DNA, 201 bp, Homo sapiens
agtataagtggaatcgcacaatgtttggccttttgtgtttggcttatttcactcagcatgtttccaaggttcatctatgctgtagcatgcatctgagcatyattaattatattacattatattatattgtacgtatgtatttatttattttgagatggagtcttgctttatcacccaggctggagtggagtggtgccatct

SEQ ID NO: 42525 - DNA, 201 bp, Homo sapiens
gagtgcagtgctgtgaacttggctcactgcaacctccgcctaccgggttcaagagattctcctgcctcagccccctgagtagctgggactacaggcgcgcrccaccacacccagctaatttttgtatttttagtagagacgaggtttcaccgtgttggccaggatggtctcgatctcttgacctcgtgatctgcctgcctt

SEQ ID NO: 42526 - DNA, 201 bp, Homo sapiens
tccagagtggccacactatctcgcatggccactgtcccaacgtgtgagctccagatgctgcccgtgctcgcccagagtgaccaatcactgcactttgtccrggtctgaggagtttcctgggatttgagactttccatgcaaaaatcaggaaactcctggacaaactaggacatgggtcacctttctctttgatggttaatt

SEQ ID NO: 42527 - DNA, 201 bp, Homo sapiens
gggactgaggctgaacttgctttggcgtggtgggtcagctggctctgggccctcagctcccccgggcgaggcagccctgcttgttgtctccacatctcctcttccctccgtttccgtggcccctggttggagggtggtgctcacccatcctgggggctttgccctcctccagcccctccccaaggccaagctgcagcttct

SEQ ID NO: 42528 - DNA, 201 bp, Homo sapiens
tgggactgaggctgaacttgctttggcgtggtgggtcagctggctctgggccctcagctcccccgggcgaggcagccctgcttgttgtctccacatctcctcttccctccgtttccgtggcccctggttggagggtggtgctcacccatcctgggggctttgccctcctccagcccctccccaaggccaagctgcagcttc

SEQ ID NO: 42529 - DNA, 201 bp, Homo sapiens
gtgggactgaggctgaacttgctttggcgtggtgggtcagctggctctgggccctcagctcccccgggcgaggcagccctgcttgttgtctccacatctcctcttccctccgtttccgtggcccctggttggagggtggtgctcacccatcctgggggctttgccctcctccagcccctccccaaggccaagctgcagctt

SEQ ID NO: 42530 - DNA, 201 bp, Homo sapiens
ctgtttcccgcttcctgagatctggaggccttctttttgcacaaatatgttgttttgaaacactgggcattgttctgaggcttcagtcacggcctgcagcsaaacgcaactcgcatttcaaccgagcgccccggcactctggggaattaggggagcggatgaaagatttaaaaatccacggtcactgtgcagagataagga

SEQ ID NO: 42531 - DNA, 201 bp, Homo sapiens
gttcattttatacaagttggaaaatatagaataatataaataatttgcataagactcataatctggttcacaggcaaccattataaatatttgaaaaaaawttttttttttttttagacaagagtttcgctcttgttgcccaagctggagcgcaatggcgcgatctcggctcactgcaacctccgcttcccaggttcaagc

SEQ ID NO: 42532 - DNA, 201 bp, Homo sapiens
taactgggaccacaggcatgtacaaccacgcctggctaattttcttaattatttgtagagatgagatcttgctctgctgcccaggctggtctcacacttcygggctcaagccatccttccacctcagcttcccaaagtgctggggttagaggtgtgagccaccatgcctagccctgcccatttttaaattgggttatttat

SEQ ID NO: 42533 - DNA, 201 bp, Homo sapiens
tctccaggataaacacctggtagtgagaatgctcaatattcagtttgtaggtaactgcctggctgttgtccagagtggccacactatctcgcatggccacygtcccaacgtgtgagctccagatgctgcccgtgctcgcccagagtgaccaatcactgcactttgtccgggtctgaggagtttcctgggatttgagacttt

SEQ ID NO: 42534 - DNA, 201 bp, Homo sapiens
gcagcagtgggctcttctctctgcaggttttcacacaacagaaaccacctgacatccacccgctgaagcgcactgctgttcagataggggacggaaggtcrtttgtttttgttctgagctccataagaactgtgctgacttggaaggtgccctgtgctatgtcgtgcctgcagggacacgtcggatcccgtgggcctcaca

SEQ ID NO: 42535 - DNA, 201 bp, Homo sapiens
tcccaaagtgctgggattacaggcgtgagccactgcacccaaccaaggctaacattttcctgctgtttgcatgcctgctaactttccatgagattatcatygtcatgtaatttacttggttgggtgctgcatatttttgtattcctataaatattcctgagctttgttctttgatgcaattaagttacttggaaacggttg

SEQ ID NO: 42536 - DNA, 201 bp, Homo sapiens
agctgatggtgcacctggtggagcgagtgcagaggtgagggcggccgtgccatagggtcggggagagcacccccaccaagaagctggacgtggggtgaggyccagtgctcactcgtgggtgtggctgcatttggcactacatgggctcgcttcactctgggaaggcgcggcgtggcatcctcttccttgtttggacccagc

SEQ ID NO: 42537 - DNA, 201 bp, Homo sapiens
accaaggggagagtaagaggcagtcctctggggccaagcctgcctgctggtaccctcctgaggtcccctcctcagcagccaagtgcagagacagctgggarcattccagatgcactgaggtggtgctcatgcggtcgtacctcgacagctgcactgtggtctgccctggacacgctggtgttccggtaccagcacacgtgc

SEQ ID NO: 42538 - DNA, 201 bp, Homo sapiens
ccctgcagtgtgctgttgtgcacgtcagggacgctgttctctatgcccactgccctcctccctctcctggcccagcagtattgctcacgggggctccagcmgccggcgtggccctcatgagctacgcctgggtcttctgcagactcatgcagccctatggccgctcagaccaaggcgcagagcaactatcagggcagctct

SEQ ID NO: 42539 - DNA, 201 bp, Homo sapiens
tcctcccatgaggtggggagaggcaacagggcagcccccagaggagtgtcctggccgctgtcctcccggggcccatgatggccatagatttgccttgtggygttggatcaggtactgtgtctgctcataagtacttgtgtcatccagaatgttttgttttttaagaaaattgaattacttgtttcctgaaatattctgagg

SEQ ID NO: 42540 - DNA, 201 bp, Homo sapiens
aaaatccacggtcactgtgcagagataaggaaatgtgattcgtgtgtggctctgaaacatgacttttcactgaacgtcgcgtcctgggcatgttcccaggygatccttcacattcctaaaggcctggtaatgcacccatacctggaaccccgggccaccctccagagtgacctcatcctcagcactgcctcagactcagac

SEQ ID NO: 42541 - DNA, 201 bp, Homo sapiens
agtgtgctgttgtgcacgtcagggacgctgttctctatgcccactgccctcctccctctcctggcccagcagtattgctcacgggggctccagccgccggygtggccctcatgagctacgcctgggtcttctgcagactcatgcagccctatggccgctcagaccaaggcgcagagcaactatcagggcagctctgcctcc

SEQ ID NO: 42542 - DNA, 201 bp, Homo sapiens
atttcactaatgtgtacaaaaaactcacagaccaatggagaccagagtgaccagcacgctgagtgattcctgagaggaaaagcatggaatgccaggacacrggccaggctggcctcaccgacagtccgcagggatgcaaagtgaaatgatggggctgctcgatggggctgcttaccttacccacttgggaagagtaagaga

SEQ ID NO: 42543 - DNA, 201 bp, Homo sapiens
aactcacagaccaatggagaccagagtgaccagcacgctgagtgattcctgagaggaaaagcatggaatgccaggacacgggccaggctggcctcaccgayagtccgcagggatgcaaagtgaaatgatggggctgctcgatggggctgcttaccttacccacttgggaagagtaagagagacaggtgcctagcactttcc

SEQ ID NO: 42544 - DNA, 201 bp, Homo sapiens
cagccccctcacgggggtgctggggtagctcctgagcccctgcccagccgattgtggctggggtgaattatggggagacagcaaaaaagacaagagctctsggtggagtaagacagcaggcttggggaagggtgtgggggcaccaggctgaggaacctggtgacccacaatggcagaccgggcccatgcagtgagatagag

SEQ ID NO: 42545 - DNA, 201 bp, Homo sapiens
tgagctgagatcgtgccactgcactgcagcctgggctacaagggtgaaactccatctcagaataaataaataaataacccagtctcaggtacactggggaygccatgccgggggtgggtgggactgggcgggcgttcagcctgcaggccacgggggtcggtggcagcagagtccttggactttgtgccggccacctcactc

SEQ ID NO: 42546 - DNA, 201 bp, Homo sapiens
atagacctccccccaggaatgcaattcttttcccagagtattaatatcaatattccttgctaggaaaagaatttagcgatatcttccctacttgcacatcygtttataggctgtctgcaagaagaaaaatatggctctttttgcccgaccccgcaggcagtcaggccttatggttgtcttcccttgttccctaaaatcgct

SEQ ID NO: 42547 - DNA, 201 bp, Homo sapiens
ggctgggaggaagccatctggtcccctcctgagaaccgaggtccgagattccccggagtgtagggggaaggtaggtgctgtggggaaggaccactagggtycccgttggcagggcaggggcagaggcttccttgggccacctcacttcccggcttgctgaagggctcccgggtgtggctcctaggcgagagccctgaaggc

SEQ ID NO: 42548 - DNA, 201 bp, Homo sapiens
ggttggatcttttcaggtcttggtctaatatttgttatgcaggaatgagtagttttcagttgatgggtaattgttcctttagggtgctaggtaaaatacaraacacacagtggaattttaatttcagataaacaacgttttaatataaatattaatatatcccctgctttttttttttttttttttttttgagacagggtc

SEQ ID NO: 42549 - DNA, 201 bp, Homo sapiens
tgaacctgggaggcgaaggttgcagtgagcagagatcatcccacctgcactccagcctggacaacagagtgtgattccatctcaaaaaaaaaaaaaaaaaaggaaaaagaaaaataaaattactgctctaagcttccactcaagaagctagaaaagaacaataaaactaaagatgaaaggaaataataaaaataagagcag

SEQ ID NO: 42550 - DNA, 201 bp, Homo sapiens
ctccgcctcctgggttcaagtgattcttgtgcctcagcctcctgagtagctcacatcacagacgtgtgccaccatacccagctaattttttgtatttttartagagatggggtttcactatgttggtcaggctggtttcaaactcctgacctcaaatgatccgcccgcctcggcctcccagtgttggaattacaggcatga

SEQ ID NO: 42551 - DNA, 201 bp, Homo sapiens
ttgaacctgggaggcgaaggttgcagtgagcagagatcatcccacctgcactccagcctggacaacagagtgtgattccatctcaaaaaaaaaaaaaaaaaaggaaaaagaaaaataaaattactgctctaagcttccactcaagaagctagaaaagaacaataaaactaaagatgaaaggaaataataaaaataagagca

SEQ ID NO: 42552 - DNA, 201 bp, Homo sapiens
gtgtgctgttgtgcacgtcagggacgctgttctctatgcccactgccctcctccctctcctggcccagcagtattgctcacgggggctccagccgccggcstggccctcatgagctacgcctgggtcttctgcagactcatgcagccctatggccgctcagaccaaggcgcagagcaactatcagggcagctctgcctcct

SEQ ID NO: 42553 - DNA, 201 bp, Homo sapiens
tccttttagaagcttgttttagggctcatatttagatctatgattgattacatattaattattgtgaatggtgtggtacggggctagagctcattttttttcgtgtagatatccaattgacctggcatcatttattgaaaagcatcattttttttccaccgaattggaggagtccccaacatctcaacataaatcagctga

SEQ ID NO: 42554 - DNA, 201 bp, Homo sapiens
cccttgttttgtggggcaacactgacagcagacacattggcaagtggaggccccagacctggcagccccagggctaatgtggagaacaggtgtccaccgcycgagtcagctgagtggcccgagtgatcatccaggccacagctgctgctacatccaaaagaggattcgcagcctccaggccaggggcccacttaccctttc

SEQ ID NO: 42555 - DNA, 201 bp, Homo sapiens
cttcgccatgttccccaggcaggtctcaaactctcagcttcaagcgatcctaccatcttgacctcctaaagtgctggcattacaggcgtgagccacagcamctggccagtgatgagtgatttctgtcttatactttcaattatttttttctataataaaggtgtaatttttaaaagtatactttaaaacaaatggggtctg

SEQ ID NO: 42556 - DNA, 201 bp, Homo sapiens
tcttaacctggaaagcggaggttgcagtgagctgaggacacaccactgcacaccagcctgggcgacaaagcaagactgtctccaaaaatagaaaaaaaaaatcatcttcatcagatgaagagctgcctctggtgaggacagagaagtgaccgaatccctggggtgctgcccagcactgcaacctcttgggatatgtgggcc

SEQ ID NO: 42557 - DNA, 201 bp, Homo sapiens
gtgtgtggcctactgctggatcctattgttcaaatgacctgtgtatatatccctttacccaaactacactgcttataggaaggcttaaaagtggggagtaygatttaactttatttttctgtttgaaaattgtttagagtattatagtgtctttgcttttccatatgcattttagaatcagcttgtctatgtcttgtcata

SEQ ID NO: 42558 - DNA, 201 bp, Homo sapiens
tagctgtatgtgtgtggcctactgctggatcctattgttcaaatgacctgtgtatatatccctttacccaaactacactgcttataggaaggcttaaaagyggggagtacgatttaactttatttttctgtttgaaaattgtttagagtattatagtgtctttgcttttccatatgcattttagaatcagcttgtctatgt

SEQ ID NO: 42559 - DNA, 201 bp, Homo sapiens
ctggccaacagggtgaaaccctgtctctgctaaaaataccagaaaaattagccaggcgtggtggtgcatgcctgtagtcccagctactcgggaggctgagrcaggaggatttcttaacctggaaagcggaggttgcagtgagctgaggacacaccactgcacaccagcctgggcgacaaagcaagactgtctccaaaaata

SEQ ID NO: 42560 - DNA, 201 bp, Homo sapiens
cagaatggacagcttccctgtgcagagcctgatacaccaaccaagcctctcactggacatcaaaaatctgaatcaacataagcaagggcaggcaaaacatygtccagatgttagtcttcccgtaagttaacacaaaaatttaatgcaatttcaactgaaatctccatggtgtttttgtaaggaatttgtccaatgacttag

SEQ ID NO: 42561 - DNA, 201 bp, Homo sapiens
cggccctggacatgtgccccgacaggctgctcccagcctctgtctcttcaaggctagagcctgggcagggatgggagtgccctgcctgtcacctgcactgmcctgctcaccctgggcctccactcctttgcagcctgcggagcccgtcaagaggcagccgaggtcccagtgcctgtccacgctggtccggcccgtcttcgg

SEQ ID NO: 42562 - DNA, 201 bp, Homo sapiens
gggttcagaggggagcgccacgccggagcgggcagtggggtgagggaaggagcgcgcgtcgtgcgaccagcggagccgtcctgaggtgggcgcagggcggycccggggctctgccgtgtgcctgtggcgttttgcgtggcagaagctcgcaggcctctagaaaccgagcccctggtggctccgcctgtgcgagggcggtgg

SEQ ID NO: 42563 - DNA, 201 bp, Homo sapiens
attctctacccctccccacttttttgactctggccgctgggttttcttacatcttagctgttcggttttattctccttgatgccttggctctacctaaggygttggaatcgccgctaaaatgtgtggccctccttgttcactcctatgtgctgaatggagagttgggcctgcagtggaacaggaagggcgtctgttcgcgt

SEQ ID NO: 42564 - DNA, 201 bp, Homo sapiens
cccacagccagggtctgcatgccagagagggccaaggagtctaggctcagaaggtaaagccagtgtttggtctggggtctgatgcagtccagttagtgacsagggttggtgttggctgcctccaggaggctgggcgggagccagaggctgggcagccagttaggaggcacccgaaggcacctgggcatcaccaaaacgggt

SEQ ID NO: 42565 - DNA, 201 bp, Homo sapiens
agcccctgacggcacagaacgggagcatcctggttgtcctcctggaaggctgctgtggccttgtgccgccttggagactgagctgagccctccctcccacrgtgacaaatgtgtggtgccccccagaagcagggcaccttcctctgtgcagccacctgccctggccggctgcaaatctcagatgctgtgagtagatctgtc

SEQ ID NO: 42566 - DNA, 201 bp, Homo sapiens
acagcttcgggggttgggttgggtggggttggggcggacgtcccgtgcagggcaggacaggtcagggcgcactggtcggagctggggcctgaggctaccgrgcgctgaggacgggcggcaggtgtccgcgcacacaccgggcgcagccctgtccccgctgccaaaccctccgcagcggccgcgcttactcctcggccaagc

SEQ ID NO: 42567 - DNA, 201 bp, Homo sapiens
ttctggagaaaacaagagttgagtgggctttctcacctccgtgcctttccttcagtcacagtacaggaccgacgggaggaagtggggggccgaggtgggasgatcagcaacatagggagaccccatccctacaaaaaatgtaaaaattagtggggcgtgggtggcaccgtggtcccagctgctcaggaggctgaggtggga

SEQ ID NO: 42568 - DNA, 201 bp, Homo sapiens
taatgatgtttccatacatatatagtgattagatcagggtaattagcttatcatctcaaacatttatcattttttcatgttggaaacattcagtattctayttctggctatttgaagctataggagatattattgttaactataaagcatccattttgcatacagatgctcctggacttacgatgaagctgcatcccaata

SEQ ID NO: 42569 - DNA, 201 bp, Homo sapiens
ataatgatgtttccatacatatatagtgattagatcagggtaattagcttatcatctcaaacatttatcattttttcatgttggaaacattcagtattctmtttctggctatttgaagctataggagatattattgttaactataaagcatccattttgcatacagatgctcctggacttacgatgaagctgcatcccaat

SEQ ID NO: 42570 - DNA, 201 bp, Homo sapiens
cacgtcccagcttcctgggacacgactggcttggggcacaccctgcacctgacccccacctgaccatgcttgaattccagcctgttcctcacttgtctgaytcccacctccacttgaccccatctgacctcccttgggccatcccccaaccttggcccctagggaccagaagaccaaggaagtactgaaggcgcccccagt

SEQ ID NO: 42571 - DNA, 201 bp, Homo sapiens
catccttcccttaacagtcaggaacgagggccagttctctgtccccaggaccagccagttaccaacaactccacagaatggacagcttccctgtgcagagsctgatacaccaaccaagcctctcactggacatcaaaaatctgaatcaacataagcaagggcaggcaaaacattgtccagatgttagtcttcccgtaagtt

SEQ ID NO: 42572 - DNA, 201 bp, Homo sapiens
aaagggaaatccattctctacatgctgaaaatgcctttgccaaaatccaaggtgttatttctgataatacctcttagaaacagaaggaaactgtgttaacrtgataaagatgatcttttcaagccaagagccatcatccttcccttaacagtcaggaacgagggccagttctctgtccccaggaccagccagttaccaaca

SEQ ID NO: 42573 - DNA, 201 bp, Homo sapiens
tggtctgagaaatagagaaagagtacaaagagaggaatgttacagctgggccgccgggggtgacatcacatatcggtaggaccgtgatgcctgcctgagcmacaaaaccagcaggttttattaaggatttcaaaaggcggggcgggggggtatgaacagggagtaggaacaaagatcacatgcttcaaagggcaaaaggca

SEQ ID NO: 42574 - DNA, 201 bp, Homo sapiens
gatcaagtaaggttgtttggggaatgcaaggatcgttcggcattagaaagctgattgataacattcatcctatcagaagtcaaagagaaaaagggaaatcmattctctacatgctgaaaatgcctttgccaaaatccaaggtgttatttctgataatacctcttagaaacagaaggaaactgtgttaacatgataaagatg

SEQ ID NO: 42575 - DNA, 201 bp, Homo sapiens
ggggtctcagtctgcgcactgagagacgcccactcagaacctctggggctgcacccgttggctcctgccacctttcccggggccctacccctcattctacmctgcagaccccaccagggagtgtccacctggtcccgtctggccctgtccagggagcaagtcctaccactgagctcaccaagactgaagcaatttcaattc

SEQ ID NO: 42576 - DNA, 201 bp, Homo sapiens
cactgtggattaattttaattttaagtagttagatgaaataattgcaaaataaaatattaccaaatctaatctaaaagcatgtaacaaggaattgtcccaygatcaagtaaggttgtttggggaatgcaaggatcgttcggcattagaaagctgattgataacattcatcctatcagaagtcaaagagaaaaagggaaatc

SEQ ID NO: 42577 - DNA, 201 bp, Homo sapiens
atctgtggtgacagatgatcagatgggatgtacctgaccaagggggcaccatacactttctgtgccaaggcctgtgggcctgttgccccatttgcccagayggctccctgagcaaacagcccctccccattcacttttcccagaagctcattcctcttactaatgaaggatcagagcttggaccagaagggttttgtataa

SEQ ID NO: 42578 - DNA, 201 bp, Homo sapiens
gggccagagggcacccaaatactcaccggggggtccagcactattagctgaaaatcaagcaaaggaaaaaatgttgagcattttgattatccaaaagggarttggacaattcatttatgaaccaaagaccaaaacctaacagagctagattcaaagaaaacccactgtggattaattttaattttaagtagttagatgaaa

SEQ ID NO: 42579 - DNA, 201 bp, Homo sapiens
gctggtgttccggtaccagcacacgtgcattgtggtgttggcccggtgctggccatgcccctccagggagctgcggacaccccgagcatcatcttctgactcctgctccagagatacctcgttgggggatcctggggagaagtcagcagcgtctcagggggaaccccctgtggcctctgcttgccaaatacttccacccct

SEQ ID NO: 42580 - DNA, 201 bp, Homo sapiens
ggagcttgaaaacatagtctttgtgtatgccatcggcctccctggggatgctcacgctgtagcccagcagcgggaggctggccagtgggtagtcatcctgsaagacagcatagggacacgggttccaggggctgggttgccacagggaatgcccattcctctgctacctgcacaacggtggcacgtacaaatgcccacggg

SEQ ID NO: 42581 - DNA, 201 bp, Homo sapiens
gcaccaacagacctctggaatccccaggaggactcccttggggtctttccgggtgcttgggcagggttgggttgaggctgaggccaggcctacaggctaayggctcggtggagcagcgtcccagggccccgagtaagcgttgatgggctgagcaaacagggaggatttgacaaggtggcgttgggcctgctggaggaggag

SEQ ID NO: 42582 - DNA, 201 bp, Homo sapiens
tggccccctggatcacctccatccacctggaggagagggcggccatcagaccagtgagccatcttgtgctcagacactgtcccaagaacaacccaggataygggacaagcaggacaaaagaagggttaaaaacctggggccgggtgcggtggctcatgcctataatcccagcactttgggaggctgaggcagatggatcac

SEQ ID NO: 42583 - DNA, 201 bp, Homo sapiens
atgttgtgtcactatcaccactatctagttcccgaactttttcatcaccccaaacagaagctctgtactcattcagcagcatctgctggtcccctccccaygtaactttgattccactttctgttgctgtgaacttgcctattcctgctgctagtataagtggaatcgcacaatgtttggccttttgtgtttggcttattt

SEQ ID NO: 42584 - DNA, 201 bp, Homo sapiens
agaggcgaagcaactcgcccaaggaatgggctgtgccggtagcttctccaaggcctggtgcgccctggcctgtgcgcgtgatcccgggcggggtctcagtrcgaacaggggcttcgcgatgtggccagcgcgggcttatctccgtgccgtgacgacaaggctagaagcctgggcggccgcggtggatcctcgtggcgaggc

SEQ ID NO: 42585 - DNA, 201 bp, Homo sapiens
ctgcccctgtgctgactcgagtccttagcaaagagacagggcaggacagatgctgggccctccaccgcccaacggacttagggtccaaccgccatgccgcyggcagatgcgccaagtcctggtccacacacagggaccccttcccggcgcccctgggcagcagctctgggggtggggtctgggccagtcattgctgctcct

SEQ ID NO: 42586 - DNA, 201 bp, Homo sapiens
agtggcgttaagtaaattcacaatgttgtgtcactatcaccactatctagttcccgaactttttcatcaccccaaacagaagctctgtactcattcagcarcatctgctggtcccctccccacgtaactttgattccactttctgttgctgtgaacttgcctattcctgctgctagtataagtggaatcgcacaatgtttg

SEQ ID NO: 42587 - DNA, 201 bp, Homo sapiens
gacggcttccagcagcagtcactgtcctgggcgcgtcccgcgctctagcccaggtgggtcccacaacggtgtgaccaaggacgtcctatgaccaccccttkacaggtaaggaaactgaggcaggagaggcgaagcaactcgcccaaggaatgggctgtgccggtagcttctccaaggcctggtgcgccctggcctgtgcgc

SEQ ID NO: 42588 - DNA, 201 bp, Homo sapiens
cacccacgtgccaccacacccagttaatttttgtatttttagtagagatgaggtttcaccttgttggccaggctggtctcgaactcctgatctcgtgatcygcctgcctcagcctcccaaagtgctgggattacaggtgtaattacagtttgcagtggtgcgatctccgctcacccgcgtgccaccacacccaacctacgt

SEQ ID NO: 42589 - DNA, 201 bp, Homo sapiens
tggaaacattcagtattctatttctggctatttgaagctataggagatattattgttaactataaagcatccattttgcatacagatgctcctggacttamgatgaagctgcatcccaataaacacatcataagttgaaaatatcgcaagtcaaaaatgcattgaatacacataacctaccaaacatcatagcttagcctg

SEQ ID NO: 42590 - DNA, 201 bp, Homo sapiens
ccctccatccagggctgctcaggatggagacatggaagacccttacctggctgccaccacgattgttttctgagccgcgtagatggtgaaacagtgtggawcagaccactcgttatcactttcttccacctgtgggtgggagaaacggtccaagtcttgtggccaagaaggaactgacagcctaagcctgagcaggacaca

SEQ ID NO: 42591 - DNA, 201 bp, Homo sapiens
cctgcagagaagatgtggccagccacggccaggaacgcatcggtcaccacaggctcagactgcagggagatgtgcagctgacgcgccacgttgcggtagacgctgggccggatcatctccagctcatcgcctgtgtggtcacaagagcaggtgagaggcagcccacgtcccagcttcctgggacacgactggcttggggca

SEQ ID NO: 42592 - DNA, 201 bp, Homo sapiens
ctaagcctcccgtgggcctagaagcatgtggacagccgggagcagcaggagcagggaggcagggccaggagatgcctctccagggcagagatgggagcgcmcaggagggtcacaggtgaggcaggcacagccaggtgagatgcgctgctgttctccggatgccctccgggagccagtctgcttggacccccatgctctccc

SEQ ID NO: 42593 - DNA, 201 bp, Homo sapiens
gaggtctgcagggccagacctgatgacatggggcaagcggacagaagccacactgggcaaatccaggccaaggcagctggacaagtggacagcgggcaccragtaggggagacaagccctaagcctcccgtgggcctagaagcatgtggacagccgggagcagcaggagcagggaggcagggccaggagatgcctctccag

SEQ ID NO: 42594 - DNA, 201 bp, Homo sapiens
ggggctcaattgtgagtgttccctcctcccacccaaggtcagccttgtcaataataaacacagtgactctctgagcacctgccaagggccaggcccgccamatacggtgttattctcacaatctacaagaaaagtactattagcgccatattcccaaggaagaaagtgagtgcccagagaaaaaactaaaatttcttggag

SEQ ID NO: 42595 - DNA, 201 bp, Homo sapiens
ctgccccattcacaggctcagtttcctcctgtgcagaatgaactcatacttcctgcttcctgtctcctgttggagccgtctcctgggctctgacatggggrtagtgggccactgggcataattgatagacatgttctgcatcccaggagctgcagaaaccaggtaaagctgtgtctctggatgttcaatatggaacattgc

SEQ ID NO: 42596 - DNA, 201 bp, Homo sapiens
gaggtcagatctgggcctggcggtgccgtgtgctttgggggtttctgggcttcgtgtttttgggtctgattagacccattgagtggcttccatgaccctcrgctgggaggaagccatctggtcccctcctgagaaccgaggtccgagattccccggagtgtagggggaaggtaggtgctgtggggaaggaccactagggtc

SEQ ID NO: 42597 - DNA, 201 bp, Homo sapiens
cccagggcgtggccagcgggcttgggcccaggtgtgccctccaggagccccacctggagcctggggagggaggatggaggatgtgggtgagaggtggtgamggcagggcctgcctgaggacggcaaagggaggagcacggtcgagggacgttggccccagcccatgtggaggccccagcgggaagcagccactcgggtcca

SEQ ID NO: 42598 - DNA, 201 bp, Homo sapiens
ccgaagctgcagaggtgggaccccgcatcacaagtgggaaggcgaggcctgcctggggtgtggactcccagctgctggaggaacattgtcctttggctcaraagagaaagccagtttctcttccggcctttccagttccagaggagcccccagggtgtccctggtttggggacagttcccacttacaagctgaaggagaat

SEQ ID NO: 42599 - DNA, 201 bp, Homo sapiens
cacgtgaccctgcatcaacgtcacctgctgatgggcagtcagcaccgtcctcagaaatgtgatacagccaggatctgtgtgcccagggcgtggccagcggscttgggcccaggtgtgccctccaggagccccacctggagcctggggagggaggatggaggatgtgggtgagaggtggtgaaggcagggcctgcctgagga

SEQ ID NO: 42600 - DNA, 201 bp, Homo sapiens
ctgagccacagaccctggatccctccctgaggtcccatgggacgggcaggctgggcatacctgcagagaagatgtggccagccacggccaggaacgcatcsgtcaccacaggctcagactgcagggagatgtgcagctgacgcgccacgttgcggtagacgctgggccggatcatctccagctcatcgcctgtgtggtcac

SEQ ID NO: 42601 - DNA, 201 bp, Homo sapiens
agtcacgtgaccctgcatcaacgtcacctgctgatgggcagtcagcaccgtcctcagaaatgtgatacagccaggatctgtgtgcccagggcgtggccagygggcttgggcccaggtgtgccctccaggagccccacctggagcctggggagggaggatggaggatgtgggtgagaggtggtgaaggcagggcctgcctga

SEQ ID NO: 42602 - DNA, 201 bp, Homo sapiens
gtacagcagaacggacttttttagtgtggagttctagcaatgttcctgcctgtatgggtttgtgcgatgctcccctctgcacacaccatccacacgcagcrtgatcccatcaccccagaaagcccctcatggcgctcctctgcaggaccaggcttcctgacccctggaagccgccggttacttctccatggcttgtgtcct

SEQ ID NO: 42603 - DNA, 201 bp, Homo sapiens
ggagagggtgggagtcacaggccctcagagtcaggagagggtgggagtcgccctcagagtcaggccatccgggtggcttgatggttttggggccggccctrgacatgtgccccgacaggctgctcccagcctctgtctcttcaaggctagagcctgggcagggatgggagtgccctgcctgtcacctgcactgccctgctc

SEQ ID NO: 42604 - DNA, 201 bp, Homo sapiens
cagtgagccaagagcatgccactgtgctccatcctgggcttcagagtgagactccgtctcaaaaataaataaaataaaacaaaattaacgtacagcagaayggacttttttagtgtggagttctagcaatgttcctgcctgtatgggtttgtgcgatgctcccctctgcacacaccatccacacgcagcgtgatcccatca

SEQ ID NO: 42605 - DNA, 201 bp, Homo sapiens
gagagggtgggagtcacaagccctcagagtcaggagagggtgggagtcacaggccctcagagtcaggagagggtgggagtcacaggccctcagagtcaggrgagggtgggagtcgccctcagagtcaggccatccgggtggcttgatggttttggggccggccctggacatgtgccccgacaggctgctcccagcctctgt

SEQ ID NO: 42606 - DNA, 201 bp, Homo sapiens
ccagcatgtgccgggaagatgagggcctgtttggagccaaatttgtgaggagagggtgggagtcacaggccctcagagtcaggagagggtgggagtcacargccctcagagtcaggagagggtgggagtcacaggccctcagagtcaggagagggtgggagtcacaggccctcagagtcaggagagggtgggagtcgccct

SEQ ID NO: 42607 - DNA, 201 bp, Homo sapiens
gcagggggcttcctggcaggcccgtgttggctacacccttggtcagggtcacctctgcggtagcccccagtgggcgaagtcgcttgtcgttgggatttgtygtaaaagccaaatgcaggaagagccctggagctcggagtggagccgttgggctcctgctggcagtgcccctgtggccctaggtggccctgggtttgagag

SEQ ID NO: 42608 - DNA, 201 bp, Homo sapiens
gcaggagaatcgcttgaacccaggagtcggagcttgcagtgagctgagaccacaccagctgactccagctgactccagcctgggcgacagtgcaagactcygtctaaaaaaaaaaaaaaagaaagaaaaaagacttactctggtggggggatgccaccctgggccagctcttaaggacagaaggtgcacaggggcaccctg

SEQ ID NO: 42609 - DNA, 201 bp, Homo sapiens
gcgagaccccccatctcaaaaaaagattgcatgttctgggttgactttcctttcagataggggctggttctcacctcatctgtgccacccaccctcaaccyggagacagctgagcacctgtgacttgtcagctttgaatttttcctggcttctctttagaacacatggtcagcagcagtgatggggctgggggcagacaca

SEQ ID NO: 42610 - DNA, 201 bp, Homo sapiens
tgccctgggcaggcagggtgtgagccctcgtccacgagggtcagttggctctaaatggccattgggacccacttgcctgcctgtggtaatgcagtgagggygctgctaggagcactctggggggcccctactggcagtggtgagtgggcctgtgaggagcaggtggctggtggtgccagtgtctggggtgtagggaacgct

SEQ ID NO: 42611 - DNA, 201 bp, Homo sapiens
gggtgtggtggcgggtgcctgtagtcccagctgcttggcaggctgaggcaggagaatcgcttgaacccaggagtcggagcttgcagtgagctgagaccacrccagctgactccagctgactccagcctgggcgacagtgcaagactccgtctaaaaaaaaaaaaaaagaaagaaaaaagacttactctggtggggggatgc

SEQ ID NO: 42612 - DNA, 201 bp, Homo sapiens
aggtcccagtgcctgtccacgctggtccggcccgtcttcggagaggtgaggatggggctgggactgggcctggagtcccgtcaaggacaaggctgtgacaytgttgcacggagatgtctccctcacagcactgtggggtggtttcagcttctagctttcctgcagctgattgtgggctgggttttctgagtggaaggagca

SEQ ID NO: 42613 - DNA, 201 bp, Homo sapiens
ctggggggacgagtgcacacagtgcggcctggcagtgcaggggccgtgtcaccgccactcttggctgcttggatcgcggagttcaggtccagcatccactkctctttctccagccgagtgctgcagggagaagggcaaggctcagtggctctgctcttccttgtgtagggccccagccctcaagggagggcgagccgtcag

SEQ ID NO: 42614 - DNA, 201 bp, Homo sapiens
aggagatcgagaccatcctggctaacacggggaaaccccgtctgtactgaaaatacaaaaaattagccgggtgtggtggcgggtgcctgtagtcccagctrcttggcaggctgaggcaggagaatcgcttgaacccaggagtcggagcttgcagtgagctgagaccacaccagctgactccagctgactccagcctgggcg

SEQ ID NO: 42615 - DNA, 201 bp, Homo sapiens
ggtggggctgggcgtggtggctcatgccacccagcactttgggaggccgaggcgggcggatcacgaggtcaggagatcgagaccatcctggctaacacggkgaaaccccgtctgtactgaaaatacaaaaaattagccgggtgtggtggcgggtgcctgtagtcccagctgcttggcaggctgaggcaggagaatcgcttg

SEQ ID NO: 42616 - DNA, 201 bp, Homo sapiens
caggagctgaggccctgctgtcgcaccttcctctccagcttaaaccaggtcccctggaggagacatacattgccacgatcctgcgggagattctgaagggsctggattatctgcactccgaacgcaagatccaccgagacatcaaaggtcctgctgggggtggatgtggctcttgtaacgtcctgagccccactgacctta

SEQ ID NO: 42617 - DNA, 201 bp, Homo sapiens
ggggagcctgcctgggtaggaccctggggcccaggaaagggctcagccacagcccctcccgcgctgtccggctcccacctgctggctgacatgtgtgtccyggaaggcttcctccttcccactggccctgcgaggtttgctgccctgttccctctgggatctgagtcacgaaactgcttctgtagcttcacgtgttagtgg

SEQ ID NO: 42618 - DNA, 201 bp, Homo sapiens
ttaaaccaggtcccctggaggagacatacattgccacgatcctgcgggagattctgaagggcctggattatctgcactccgaacgcaagatccaccgagayatcaaaggtcctgctgggggtggatgtggctcttgtaacgtcctgagccccactgaccttagagaggccggggcctgtgaggggcaagtggctagtggtg

SEQ ID NO: 42619 - DNA, 201 bp, Homo sapiens
gaactgacagcctaagcctgagcaggacacaaggtgactgctggcaatgctaggtggggcttggaagcccagtgctgtccaagtgcacacagactctacamgaggccaaggaggacactggtatccctgcgccatggcagctgcaccccagggggtgagccatgggccagagggcacccaaatactcaccggggggtccag

SEQ ID NO: 42620 - DNA, 201 bp, Homo sapiens
gctgtgacagggttgtgggtgccagggcagggccccggtcctagaacagggggtctgcaggggtatttgttcctgaaatgatgttctctacatctgtgatrctgaaatgcaagattggccctggttcatgattaagtgagcatttcctggtgggaactgagtgccctgtgctctgatgctggccagggcgctgcagagtca

SEQ ID NO: 42621 - DNA, 201 bp, Homo sapiens
tgcatcaagaaagcatcaagtttctaactccgcgctggtgtagctgtcaggaggacttatggaggggtgagggaagccctttctaaatacgtgactttcasgagtggaggagaacttggttaacacatactgaggttttttgtttttgatgaggtttttttttttaaattttttatttttttgagacctagtttcgctctt

SEQ ID NO: 42622 - DNA, 201 bp, Homo sapiens
ggcagctttctgcatcaagaaagcatcaagtttctaactccgcgctggtgtagctgtcaggaggacttatggaggggtgagggaagccctttctaaatacrtgactttcaggagtggaggagaacttggttaacacatactgaggttttttgtttttgatgaggtttttttttttaaattttttatttttttgagacctag

SEQ ID NO: 42623 - DNA, 201 bp, Homo sapiens
gctacttgggaggctgaggcagaagaatcgcttgaacccaggaggcagaggttgcagtgagccaagattgcaccactacactccagcctgggtgacagagygagaagccatctcaaaaacatttaaaaaagggtcgaggcttgaggacacacctctgctggcttcccctggactctgggcctgggccacagaccccaggca

SEQ ID NO: 42624 - DNA, 201 bp, Homo sapiens
gatgatgctctctatggcaggagggtgatattttaacactgactgcttacctatgacagccagtgggctgatgagcttatgctttgacatgcacttgtggkcccagctactcaggaggctgaggagaccagcctgggcacacagcgagaccccccatctcaaaaaaagattgcatgttctgggttgactttcctttcagat

SEQ ID NO: 42625 - DNA, 201 bp, Homo sapiens
gggtggtcctccaccagaaatggagcaaacagggaggaggaaacggagatgatgctctctatggcaggagggtgatattttaacactgactgcttacctaygacagccagtgggctgatgagcttatgctttgacatgcacttgtgggcccagctactcaggaggctgaggagaccagcctgggcacacagcgagaccccc

SEQ ID NO: 42626 - DNA, 201 bp, Homo sapiens
actctcaggccagcctaaatcccaccttacaggggtgtctttttctggaatacccccacattatttatgctaggaaaccctgttgctgtatgatttgtgtstgtgaggggatggagggatgaggagtgggaagctgttgactcatgcacatacctgtctccatggtgtctctgctgtcgacctcctctcccccagctccag

SEQ ID NO: 42627 - DNA, 201 bp, Homo sapiens
cctgatagccttttcttgggctgtttcttgaagcattctgtgtttgttctaggaatgttctaacgaggttccagaatgctcttcatttctctgtgtttctrtttcttctcacgtcatctttctaatttacgttggtctctattgttcatgttgaaagtcttcccaaatacccaatatccttagcagtcttaaagagactaa

SEQ ID NO: 42628 - DNA, 201 bp, Homo sapiens
gctgagactacaggcatgcaccaccatgcccagctaatttttatatgtttagtagaaactgggtttcaccctgttgaccaggctggtcttgaactcatgamctcaggtgatccacctgcctcggcctcccaaagtgatgggattacaagcgtgagctaccgtgcctggcatattttactttattttttaattgatacaata

SEQ ID NO: 42629 - DNA, 201 bp, Homo sapiens
tcacttttacccaggaggcggaggtttcagtgagccgagatggtgccattgcactccagcctgggcaataagagtgaaactccgtcttaaaaaaaaaaaaagaaagaaagaaaagaaggccgggcacggtggctcacgcctgtaatcccatcactttgggaggctgaggcaggtggatgacaaggtctaggagtttgagac

SEQ ID NO: 42630 - DNA, 201 bp, Homo sapiens
ctcatggcgaggaagtccccacccctccatccagggctgctcaggatggagacatggaagacccttacctggctgccaccacgattgttttctgagccgcrtagatggtgaaacagtgtggaacagaccactcgttatcactttcttccacctgtgggtgggagaaacggtccaagtcttgtggccaagaaggaactgaca

SEQ ID NO: 42631 - DNA, 201 bp, Homo sapiens
cactaaccacaaaggacaaagttgatgaactggatcatgctaaaatgaggaatttctcttcccatcccaggcatgtgcctacatgggacagagggctggcrtggatgtcacacaggtggcacagcctgaggaagatgctgctgcagaggctgactctaagcttgcggggagcaggccttgtcctgccaggtgctgacagag

SEQ ID NO: 42632 - DNA, 201 bp, Homo sapiens
tgggaggccgaggtgggtggatcacctgaggtcaggaggtcgagaccagcctgatcaacatggagaaaccctgtctctaccaaaaattcaaaattagcccrgcgtggtagcgcatgcctgtaatcccagctactcgggaggctgaggcaagagaatcacttttacccaggaggcggaggtttcagtgagccgagatggtgc

SEQ ID NO: 42633 - DNA, 201 bp, Homo sapiens
gagccccactgaccttagagaggccggggcctgtgaggggcaagtggctagtggtgcccagggtctggagtatagagaaccttgtggccaccctgaaactsagcagtcctgtctcgctccctttccagaagatactacttgtaacggtttccttgtacgctgaggaaaccagctgtggactgagtgtaggaaagggccaca

SEQ ID NO: 42634 - DNA, 201 bp, Homo sapiens
agaggtgtgtggtgcagagacagagggacaggagctccctgggctggaggctctcctcccacaagctgcctggacccccttccccatctggaaggggggaygcgcccctggtctgctgctcatgccgggatctgtggtgacagatgatcagatgggatgtacctgaccaagggggcaccatacactttctgtgccaaggcc

SEQ ID NO: 42635 - DNA, 201 bp, Homo sapiens
tagagaggccggggcctgtgaggggcaagtggctagtggtgcccagggtctggagtatagagaaccttgtggccaccctgaaactgagcagtcctgtctcrctccctttccagaagatactacttgtaacggtttccttgtacgctgaggaaaccagctgtggactgagtgtaggaaagggccacacttggctggagttgt

SEQ ID NO: 42636 - DNA, 201 bp, Homo sapiens
caccccatcccaccatgggcagaaagccagggactgtttgcaccccaggaggcgcagcactgcacaataacccctacagtttgcacgggctgaacgaggtyccgtgagagctgctgtcagggcaggtgacccgggttgccccctcgggagaggtgtgtggtgcagagacagagggacaggagctccctgggctggaggctc

SEQ ID NO: 42637 - DNA, 201 bp, Homo sapiens
gcttattctaaacctcggagtccttccttccccttctgtctcgtggcccagaatgtctacttcttcatgaagcaacgaaatgcttcctacctgcagtgagygatggggtgcgctggttccgagtcacagaaaagcagcctcacgctgcttctagaaggaagggaatgtatgatctgcgcctccagaaaaggcacccccagg

SEQ ID NO: 42638 - DNA, 201 bp, Homo sapiens
ccttcccactagaactaaaatgagattcctgtgttttcacttggccagcgcaagccttcctcctgggcggagggacccccctgaggtctccccacctcccktggggggtttccctgtgcctgggaggcagatgggctgtggtgagccctgagtggactcagccaacagcaggggctgctgctattgtgccccccaccccct

SEQ ID NO: 42639 - DNA, 201 bp, Homo sapiens
tttctactgaatgcatattgctttagcatcattgtaaagctgaaaattcctaaattgaaccatcataagtcggatactctcggcatgagttcaactttctygtatctgaagcaggacaggctccgacagttcatgaaacttggccactcgctttaacctttttccattttagaaaaaaaaaaattcagctccctgctagcg

SEQ ID NO: 42640 - DNA, 201 bp, Homo sapiens
ggaaagatcaaaattcaaagtacagtttctactgaatgcatattgctttagcatcattgtaaagctgaaaattcctaaattgaaccatcataagtcggatmctctcggcatgagttcaactttcttgtatctgaagcaggacaggctccgacagttcatgaaacttggccactcgctttaacctttttccattttagaaaa

SEQ ID NO: 42641 - DNA, 201 bp, Homo sapiens
cccaggaaagatcaaaattcaaagtacagtttctactgaatgcatattgctttagcatcattgtaaagctgaaaattcctaaattgaaccatcataagtcrgatactctcggcatgagttcaactttcttgtatctgaagcaggacaggctccgacagttcatgaaacttggccactcgctttaacctttttccattttag

SEQ ID NO: 42642 - DNA, 201 bp, Homo sapiens
tatggctagcccaggaaagatcaaaattcaaagtacagtttctactgaatgcatattgctttagcatcattgtaaagctgaaaattcctaaattgaaccaycataagtcggatactctcggcatgagttcaactttcttgtatctgaagcaggacaggctccgacagttcatgaaacttggccactcgctttaaccttttt

SEQ ID NO: 42643 - DNA, 201 bp, Homo sapiens
gcccctggcagccgaggatggcccctacaggcccaccgccccagtgctgcctgtggcacccttggcagcagcagcgcacaggcacggggcagatggtgccragaatgccacagggccctgggattgggagtccgcagcccggccagttctccagccaaagcaaacagggtaatgctgctgaccggaccatcccagctgata

SEQ ID NO: 42644 - DNA, 201 bp, Homo sapiens
attgttaactataaagcatccattttgcatacagatgctcctggacttacgatgaagctgcatcccaataaacacatcataagttgaaaatatcgcaagtmaaaaatgcattgaatacacataacctaccaaacatcatagcttagcctggctttccataaacgtgttcagaacactaacatcagcctgcagctgggcaaa

SEQ ID NO: 42645 - DNA, 201 bp, Homo sapiens
catggatttttaaatctctcatccactctcctaattcctcagagtgcttgagcgctcagttgaaatgcatgttacgtttggctgtgggccgtgactgaaayctcagaacaatgcccagtctctgcccccctccccctgcccctctcttgaagtggcctctgccctgtgtggtgacccccaacctcagcttctgggtgggcc

SEQ ID NO: 42646 - DNA, 201 bp, Homo sapiens
ggccaggaaggtgaagcccaaagacagcccgagccgctcaccgcccccgccccgtgttctctgtgagggagccccctggaagggggtgcttctctgactcycccaaagtgggagaagcccactgggtggcacagaggcctccagcctaggcccagagcaggggtggctggcagaattctattcccagcacccaggtcacag

SEQ ID NO: 42647 - DNA, 201 bp, Homo sapiens
ccttctggaacccactcccagggagaaagcaaagtacctggccaggaaggtgaagcccaaagacagcccgagccgctcaccgcccccgccccgtgttctcygtgagggagccccctggaagggggtgcttctctgactctcccaaagtgggagaagcccactgggtggcacagaggcctccagcctaggcccagagcaggg

SEQ ID NO: 42648 - DNA, 201 bp, Homo sapiens
ctgaaacatgacttttcactgaacgtcgcgtcctgggcatgttcccaggcgatccttcacattcctaaaggcctggtaatgcacccatacctggaaccccrggccaccctccagagtgacctcatcctcagcactgcctcagactcagacacccgaagctgcagaggtgggaccccgcatcacaagtgggaaggcgaggcc

SEQ ID NO: 42649 - DNA, 201 bp, Homo sapiens
cagtgcatggataggccacattttatatatccattcgttgatggacttcgggtttttccccacctcttggctattgcgcataatgctgctatgaacatggmatacaaatatctctttaaaggggccgggtgcagtgtctcatgcctgtaatcccagcactttgggaggccaaggcaggagtattgcttgagtccaggagtt

SEQ ID NO: 42650 - DNA, 201 bp, Homo sapiens
tctgaaacatgacttttcactgaacgtcgcgtcctgggcatgttcccaggcgatccttcacattcctaaaggcctggtaatgcacccatacctggaacccygggccaccctccagagtgacctcatcctcagcactgcctcagactcagacacccgaagctgcagaggtgggaccccgcatcacaagtgggaaggcgaggc

SEQ ID NO: 42651 - DNA, 201 bp, Homo sapiens
agtcctccaacagctcagaggagagaactggcagaggaggtagtggttacgtaaatcaactcagtgcggggtatgaaagtgtagactctcccacgggcagkgaaaactctctcacacaccaatcaaatgacacagactccagtcatgaccctcaagaggagaaagcagtgagtgggaaaggtaatcgaactgtgggttccc

SEQ ID NO: 42652 - DNA, 201 bp, Homo sapiens
aagacagagagttttgtcttcattttgtgatggatggctctttcctttgcagccaaacagggaaaaagttaatggcgaagtgtcgaatgcttatccaggaraatcaagagcttggaaggcagctgtcccagggacgtattgcacaacttgaagcagagttggctttacagaagaaatacagtgaggagcttaaaagcagtc

SEQ ID NO: 42653 - DNA, 201 bp, Homo sapiens
gctgcgcggtggcccggggggcccgggcggcagggcaagcagcgcggcctcggcctatgcgaccggtggcgccggcgcggcttctgcctggagaggtaggygcgggccggctggcgggagcggacgcgggggacctccggggcctgagggctgatgcgcagccgcccccggcgggtaaggggcgggcagggcccgaaaggc

SEQ ID NO: 42654 - DNA, 201 bp, Homo sapiens
tttgggaggccaaggcagttggattgcttgcgcccaggagttcgagaccagcctgggcagcatggcgaaaccctgtctctaccaaaaaaaattacaaaaaattaactgggtgtggtggcacatgcctgtagtcccaggtactcgggaggctgaggtgggaggatcacttgagcctgggaggtcaagattgcagtgagccat

SEQ ID NO: 42655 - DNA, 201 bp, Homo sapiens
taaatggatttttttctataaaattggctgtaagccagagtatatcaggtactataaatacatcactaatttgaaacaaataatggctcaggcaatcccctgtctggaatatttccagtggtggaatgggttttgctttgggttgcgtgcacgcgcacgcacgtgtgtgtcttcgctttactgtttttctgttctaatttt

SEQ ID NO: 42656 - DNA, 201 bp, Homo sapiens
ggaacacttccgccgcttcgaggccattttatctccgtcctccgtccccaaggcccgggttgagaggggtgctctggcggccggagagaccggccactcasggaggccggaggatgccctccccgggctgagcggcggcgctcgttttttcctcgcctcggggtcgcccccttcacctcccttgggcctctcctgaggacc

SEQ ID NO: 42657 - DNA, 201 bp, Homo sapiens
aaggtctcttatggtcttgtatgtagtattgaatccccttgaatatattgtttagcagttttgatcattatgtatttgcttcttgctcctcaaaattgtaygttagttagtaggtccttcagcaaaagaagactgaagatagtattttggttttattcttgtttttaatttttttagttgtctccaacttttctgcctcta

SEQ ID NO: 42658 - DNA, 201 bp, Homo sapiens
ctgtggtaggtactaccttactttaacaacataatgctataaaaggaaagacttaaactggtattacccttttatagtcccttagcaacatgcgtaggatrctacttgaggtcattatatttctcttcaccctttatggcgacatcaaatgatttgaatggctgatcagcttttttacgagggaatttgtaaaaactaccc

SEQ ID NO: 42659 - DNA, 201 bp, Homo sapiens
attatatttctcttcaccctttatggcgacatcaaatgatttgaatggctgatcagcttttttacgagggaatttgtaaaaactacccaataactctaatratggaagatgttaacaaaggaagatctgggtacagagtatataggaactctgtaatatctttgccacttttttgtaaatctaaaactattttaaaattgt

SEQ ID NO: 42660 - DNA, 201 bp, Homo sapiens
agattgtataaggatattagctgtgatgagactcactgcattattttttttagtgaattttatgaaatccccgttccattcaacaggcacatgtttaaaaragctttgtcgttggtgttaatgggggaatgtgttccttcattgtatttgggccttttgtattgcactcttgatattaaattaaatgtgccttgaaatagt

SEQ ID NO: 42661 - DNA, 201 bp, Homo sapiens
ttctgtttgaagaaaatagagggagaaacagaagtcttaagtctgtggcacactgtgtcttcagacagtttgaaggaatgaaaacctagagattttaaatyatgaattgaacatgtaaaattccagtaaaatgtaaaaacggaatatgcatcgctcttaaccttgagcatagtgacttagagacactgtgtatcagttttg

SEQ ID NO: 42662 - DNA, 201 bp, Homo sapiens
ataagctggaatttatattgaacagcatccatgatactttagtattacaactaaagttgtacatactgagtaggtaggatgccttagtaactagataaaasgtataccacctagccatagtgataaatatagctgttttcaaactgtcattcacagatctctaccacagtacctgttacatgaagttcctggttggttctc

SEQ ID NO: 42663 - DNA, 201 bp, Homo sapiens
tacatatagaagtcttcttatgtgttattaaagtcttctaagatagtattctggtcattggagacaccaaaaatctatgggcacagtcctgttcctgtttyttttgccaatagaatgttccttaaggttcagtcacagtccttttacttcccttacagagattgtttaaatttccacaaaagcacgtatttactcttcttt

SEQ ID NO: 42664 - DNA, 201 bp, Homo sapiens
tgcttgcatgttttcatttctttgagatacatgtttaagagtgcaactgctgagttatatggcacattcatttttagttgtattaataaaaggaactgccwtacttcttcagataccatttttatattctcacctgcagtgtaggaaacttcagtttctctgaatcctcaccagcgtttggtgttgccactaatttttatt

SEQ ID NO: 42665 - DNA, 201 bp, Homo sapiens
agctttttgttttgaaataattatagattcataggaagttgcaaataaatgtacagagaggttctgtgcaactttcactgagcctgcttcattgttaacaycttgcgtgactagcagacatctctaataactgtgaaaatcagggaattgacattggtacaatccacagagcttattcacatttcacgttatactagcact

SEQ ID NO: 42666 - DNA, 201 bp, Homo sapiens
tactagatttttgctcagtgaaacaaatatattcccaaaccacttagtatatttgttccttttactaaatttatattagaaaattttaactgtaatcctayttaagccttagtatggagttagatcttgggccagatctactttgagtatgaagaaaatgatgaatttaatgctaataactatatttcatattttagaaat

SEQ ID NO: 42667 - DNA, 201 bp, Homo sapiens
ataaatggatttttttctataaaattggctgtaagccagagtatatcaggtactataaatacatcactaatttgaaacaaataatggctcaggcaatcccctgtctggaatatttccagtggtggaatgggttttgctttgggttgcgtgcacgcgcacgcacgtgtgtgtcttcgctttactgtttttctgttctaattt

SEQ ID NO: 42668 - DNA, 201 bp, Homo sapiens
taatgggggaatgtgttccttcattgtatttgggccttttgtattgcactcttgatattaaattaaatgtgccttgaaatagttggtttttttttttttttaagttcaaagaatattatgatgattttgttgtactctttaacattttaatttggggcggggagggcctgttgagagcagattcattttggaaatactgtt

SEQ ID NO: 42669 - DNA, 201 bp, Homo sapiens
tcacaatttgcctttttgtgggtgtacgttttggtttttttttgttgttttttttctttgttttttttttcttttctttttttttttttttttttttttttgcttcaatacttctgccgctttggaaattgtaacagttaattactttgaatgttgctaaaaggacattttgtgtagggtcaagttatttttatatgagtt

SEQ ID NO: 42670 - DNA, 201 bp, Homo sapiens
ttaaccatttagtttggggctctatattacttgcttgagccttaatcaatgtggttttattcaatggtttgttctttgaatggttgcaaaaactgtagatmatcttactgaggactgtacaaacatgaaggtgtggtatcaaacttcaggttgaaactgtttgaagcattataaacattcatttcacaactagattgtata

SEQ ID NO: 42671 - DNA, 201 bp, Homo sapiens
atgtttggattgtaaagtaaaatgtatgtagccactttaagtcccagatttggagatgtaatcaaatggcctcaattcctaagtgagtaaccttaaataawgttatttttttaattgacaaataagttttttacatattcaaggactactacatagtgatgtttcaatacatataatgtatagtgatcagatcggggtaat

SEQ ID NO: 42672 - DNA, 201 bp, Homo sapiens
aatgtttggattgtaaagtaaaatgtatgtagccactttaagtcccagatttggagatgtaatcaaatggcctcaattcctaagtgagtaaccttaaataaagttatttttttaattgacaaataagttttttacatattcaaggactactacatagtgatgtttcaatacatataatgtatagtgatcagatcggggtaa

SEQ ID NO: 42673 - DNA, 201 bp, Homo sapiens
ttcaagaacttttctgataaagcgctagattccttagtgtaataatactggtatagccaaggtgtgtgttaattaactggctctgtttccatttcaaatgrtaatttgagatgaaaatagatggatttcagaattgattattgatgtaatagaaacaaggtgtagctgtttgggcactttttgtttagggtttatttttac

SEQ ID NO: 42674 - DNA, 201 bp, Homo sapiens
atacatagatacagatactgatataccggttaaatatgtacagctcaaatagctaaaattgtctttaagattttttaaattaaaaatattattggccgggygcagtagcttacacctgtaatcccaacactttgggaggccaaagcaggtggattacctgaggtgaggagttcgagaccagcctggtcaacatggtgaaac

SEQ ID NO: 42675 - DNA, 201 bp, Homo sapiens
attttcgtttgttttttggtaatgtttggattgtaaagtaaaatgtatgtagccactttaagtcccagatttggagatgtaatcaaatggcctcaattccwaagtgagtaaccttaaataaagttatttttttaattgacaaataagttttttacatattcaaggactactacatagtgatgtttcaatacatataatgta

SEQ ID NO: 42676 - DNA, 201 bp, Homo sapiens
ggttaattgcaaagatgatcagtagccaagtaatttcttctgaactacctaccttttcaaaatcttcaggaattatttcctgtgacttttgtccttttatrtgtaacagtccttggttgagaacatgggcctctttggagtgttatagaggaccacactatccttaaggatcagacttgctatggaactaaggcactggat

SEQ ID NO: 42677 - DNA, 201 bp, Homo sapiens
tttccccaccttcttatgtatgtttcctttgatttggtcgtaattgtttcttttgctttgcacagactcaaatccagtacctcaagcaagtccagcagcckagcgttgcccaactgagatcaacaatggtagacccagcgatcaacttgtttttcctaaaaatgaaaggtgaactggaacagactaaagacaaactggaac

SEQ ID NO: 42678 - DNA, 201 bp, Homo sapiens
agtcctgttcctgtttcttttgccaatagaatgttccttaaggttcagtcacagtccttttacttcccttacagagattgtttaaatttccacaaaagcaygtatttactcttctttcacttgttactaaatgacttcttcacattttactttgctaaaggctggcttttatcattttctttacttttttttcccactaac

SEQ ID NO: 42679 - DNA, 201 bp, Homo sapiens
ctaatgatgtaactggcctaagagagtctgaagaaaaactaaagcaacaacagcaggagtctgcacgcagggaaaacatccttgtaatgcgactagcaacyaaggaacaagagatgcaagagtgtactgtaagtatttcaagttatataaatgtctttagttgaggaattggtttttagtccacattattacatgttaatt

SEQ ID NO: 42680 - DNA, 201 bp, Homo sapiens
taggctgggtgtggtgactcaggcctgtaatttcagcagtttgggaggccagggtgtgaggatcatttgagctcgggagttcaagaccagcctgggcaacrtagtgagaccccatctctacaaaaaaatgagccatgtgcctttggtcccagctatacaggaagctgaggcagggacatcgcttgagcccagaccctgttt

SEQ ID NO: 42681 - DNA, 201 bp, Homo sapiens
taatgtgcattttcctaatgatgatgcccattgttaagataccaaatagtttaccttaaaaaaaaaaaacttttgtaataaaatactttttcaaaaaatcrtaatatgtactgagccgtttaaatctcacacttgggagatgtttcataggtctcattatagaactttgtgtcttcaggaagaacactaaattcatattgt

SEQ ID NO: 42682 - DNA, 201 bp, Homo sapiens
ttgatggggagaagaaactattaattaaatgcccattttgtgccagttaccatgctaaagattaatgtctgtcttcagaaatagcacagtatttgggcccyggttgtggtaattctttttgagatggggaaactgaggtgcagagattttgctacttttgtatttgcaaagttgacaacctgtttcagaataccaaggtta

SEQ ID NO: 42683 - DNA, 201 bp, Homo sapiens
gtagggtcaagttatttttatatgagttaatgtgaaattgtaaatggaaatttttccttaaaatacaacacaatgatgtctgtataaatctgtctgtttaraatctgtgctgtgtaagggcattcgtactcatgctgttactgtacttatgcaccattcagacttgttagagtagatgtgggtttatgactgccaagtttg

SEQ ID NO: 42684 - DNA, 201 bp, Homo sapiens
cagatagaggataaggaaaagatggcctttcagttcctcatcagtaccttgctactacagtgtctgcagattggtgtcttacattcagctatgatttgttygccaaggtaccgtgtcttcttactgaagttgttttggctggcgcttgcctccgttcagagggaactgagttacctaactttatgatgctaagagccagga

SEQ ID NO: 42685 - DNA, 201 bp, Homo sapiens
tttactgtattgtttgggggataatgacaagaaaaaaaatctgtacatgttcagtatagacccagttttttcttccttgaatattttccttctacagttgsttgaattcattgttgcatgtggagggccaactgtatattattttaagtatctgacttcccccaaaacaaactcagtcatattttaagattccaagcaaaa

SEQ ID NO: 42686 - DNA, 201 bp, Homo sapiens
gaagatggtaattatggggaagcatctgctgtgatatagttatgtttgtatgtgttacatctatcactgtaataattgtaagcaaagacagagagttttgkcttcattttgtgatggatggctctttcctttgcagccaaacagggaaaaagttaatggcgaagtgtcgaatgcttatccaggagaatcaagagcttggaa

SEQ ID NO: 42687 - DNA, 201 bp, Homo sapiens
gataatttgagatgaaaatagatggatttcagaattgattattgatgtaatagaaacaaggtgtagctgtttgggcactttttgtttagggtttatttttrctgctgtgttggcaaaatactgaaatgcagaagatggatgtgtcccagaaaagaagatggtaattatggggaagcatctgctgtgatatagttatgtttg

SEQ ID NO: 42688 - DNA, 201 bp, Homo sapiens
ggccttcggtgatacctcatcactcttgtctcctcgacctggattttaaggttatttcaactataatggaacctaaccttttccagcttttttttttttttaaaacagctgtcacctgcatacgccagctgaacaacttcctgttcttccaattataatacaagtgaggttttgcagacagggcagggcagcaggagcaaa

SEQ ID NO: 42689 - DNA, 201 bp, Homo sapiens
tccaggctggagtgcagtggtgtaatcacacctcacttcagcttcccgagtaactgatttcaggtgtgcgccaccaagcgcagctaatttcttaatttttstagagatgaggtcttccctatgttgcccaggctggtcttgaactgctgtactttggcaatccttactccttggcctcccaaaactgttgggattataggt

SEQ ID NO: 42690 - DNA, 201 bp, Homo sapiens
ggagtgcagtggtgcaatcttggcttactgcagtctccgcctcctgggctcaagcgatcatcccacctcggcctcctgagtatctgggggctacaagtacrtgccaccacgcccagctaatttttgtatttcttgtagagatggggttttaccatgttgcccaggctggtctcgaactcccgggctcaagagatagccacc

SEQ ID NO: 42691 - DNA, 201 bp, Homo sapiens
tctcaaatctccccctgttgtgcattcctaccttgagtttaattactcttacatacacacacatacacacacacagtggctgttataaaagaggtaacatygtctctaggaggaatttgtgattcaattgggaaagcttactaaacttaatatttaagtgaataatttagatattacagaagtttcctattgtggagtcag

SEQ ID NO: 42692 - DNA, 201 bp, Homo sapiens
ctgcctttgaagatgtagttaatagaatttaatcttttctaagtgcacattgaagttgccttttatgttcatattatgttcatattttatttgaaaaatckatagcatttttattgtgctgaaagcattaatatttgcagcactttgtgagacaggcaaaattatctttttgctgacttggaaactgcaagagttaaaaga

SEQ ID NO: 42693 - DNA, 201 bp, Homo sapiens
ttctgagacagagtctcactctgttgcccatgctggagtgcagtggtacaatcttggctcattgtggcctcataccccagcttatgcgatcctcccacctytgccccccaaagtagctcagactacaggtgtgccactacgcctggctaatttttgtattttttggtagagatggggttttgccatgttacccaggctgat

SEQ ID NO: 42694 - DNA, 201 bp, Homo sapiens
ttgagaggaacaggactttaagcaggaaaaccaattgtgaggctgttaaaatagttcagatgaaatacatgaagccactggtggtagcagacaggacagartaggtgttttggaggcacaatcaataggacttgtttagtttggatgctgttgtggaaggaatgaaaaaaatctagggaggaatcacagcttcaggtttgt

SEQ ID NO: 42695 - DNA, 201 bp, Homo sapiens
ccttgccaaaatcctggcataggaatttgaaccctggtgtatgaaaagtctgccctttgcatactcaggtttcgcatcccgtgaatgctgtatttttgatycgagtactgtattttttaatctgagtttgattgaaaaaaatccaaatataaatggacccatgcagctaaaacctgggttggtcaaggaccaactataata

SEQ ID NO: 42696 - DNA, 201 bp, Homo sapiens
agatttgatatctgggttctaagactttgcagcctaatgcatgtgtcatgctaaaatagaagtagttagacatgtggagttaaatatggtgatggtttctsagatgattaaaatgactgccaccaggttaaggtagttacaaagcagctttctgtaatggcagcagagataataaactgggcaacaagggaggaaccaatt

SEQ ID NO: 42697 - DNA, 201 bp, Homo sapiens
atgtaactggcctaagagagtctgaagaaaaactaaagcaacaacagcaggagtctgcacgcagggaaaacatccttgtaatgcgactagcaaccaaggamcaagagatgcaagagtgtactgtaagtatttcaagttatataaatgtctttagttgaggaattggtttttagtccacattattacatgttaattttaaac

SEQ ID NO: 42698 - DNA, 201 bp, Homo sapiens
actaaatgacttcttcacattttactttgctaaaggctggcttttatcattttctttacttttttttcccactaacccccccgcccttttcttgagacagrgcctctctctcatccaggctggagtgcagtggtgtaatcacacctcacttcagcttcccgagtaactgatttcaggtgtgcgccaccaagcgcagctaat

SEQ ID NO: 42699 - DNA, 201 bp, Homo sapiens
gaaaggccacacgggcctggtgcggcaccggtctctcgtgagccgctctaccttcccgcctgcggggaacacttccgccgcttcgaggccattttatctcygtcctccgtccccaaggcccgggttgagaggggtgctctggcggccggagagaccggccactcacggaggccggaggatgccctccccgggctgagcggc

SEQ ID NO: 42700 - DNA, 201 bp, Homo sapiens
tgccttagtaactagataaaaggtataccacctagccatagtgataaatatagctgttttcaaactgtcattcacagatctctaccacagtacctgttacrtgaagttcctggttggttctcaaaattttatgttcgtatatacatagatacagatactgatataccggttaaatatgtacagctcaaatagctaaaattg

SEQ ID NO: 42701 - DNA, 201 bp, Homo sapiens
tgacatcttgtccatataatattttgaaatgctgctgaaccttgacatctctacatttcctttttacttacatcattattaagatcactttctgaaaaacygttgtaggctgggaagttagcaagaacaaatcaatttatttctgtcttttggaaggtgaaagtattttcagcctactcgtgctgctgacttaatcttttc

SEQ ID NO: 42702 - DNA, 201 bp, Homo sapiens
cgagtgatctcagtgaatgacagttgtttgctgctcggagtgtggggtgttttttaaaataggaaatgtcagtatcaatctaatattatagaacagtcagwatgtgaaaatgaaaggaccaaatgccaacctcacttggactcttggttcccaacagtaagagaaacaaatttgaaagaggaaggaggtggcatcaggagc

SEQ ID NO: 42703 - DNA, 201 bp, Homo sapiens
ttatatttattttggtgctagctataaataaaagcaaagagtaagtatatccatgtcatgcatatgttcagtaacttagctctgtctcttcaaatctctttgaagtagatctgtaaataaaactcagctcttcagaaacaaatttcttcatgatacttgaactatttagtttgttattattgaggatattctcataaaggc

SEQ ID NO: 42704 - DNA, 201 bp, Homo sapiens
gggtgggacggggcagtttttccagcgggccatacgggaaaatttttggttcgaggaagacaaccaccctttttaaggagaaaactgcatcttgccctgcsttattcctacgcggtgcccaggtggggtgtgtgtggaccagtcaatgaccgcccaagctctccgagtagaaaacccaaacatggttttgtggggtgtgtg

SEQ ID NO: 42705 - DNA, 201 bp, Homo sapiens
cttggagctggggtgtaactggaggggcgggcccttctccaagttagagttggggttctgagcgagtcgtgcgttttaggtttagtgtcttttccttgtcyctgctcggggagcgtgaggcagatcggccggctttgctccaggcctcaggagtgtaagtttaagggcgcgaacctgggtgggacggggcagtttttccag

SEQ ID NO: 42706 - DNA, 201 bp, Homo sapiens
agccagcttggaagttttacagcaataatgttgcagtggaatattatttgtagttaaggtcatcctcctcccctttctgtttttttaaatcaagaactacrttctgcccctctcttgggcttcagaagcatctaagaaaagcagtcatcaattataattaactttcaaagggcaagtcagaagttgtttataaattacaaa

SEQ ID NO: 42707 - DNA, 201 bp, Homo sapiens
ggccggctaatttttttctttttctttttttttttttctggtattttttgtagagatggggttttgctgctgcccaggctggtctcgagctcttgagctcragagatctgcctgattcagcctcccaaggtgctgggattacagacgtgagccactgcactcggccccaacgcattactttgatttaatatttggatcatt

SEQ ID NO: 42708 - DNA, 201 bp, Homo sapiens
cttcatggtctaccaaccaaccccgtgggaggcagcctcagactcggtatttttgttttcatgtacttattgaaaaggtattgtgttaattcttggcattrgataacttacataataataacagtttttacttaccaaatactttccatgtgtcagaccctttggtgagtactcaacagtgttacttcatttaatcctcac

SEQ ID NO: 42709 - DNA, 201 bp, Homo sapiens
acttcttaagtactatgtaaagttgtaagagtaaattggaaatcattactgtgtgatgtattatttatttattgaacaagcatcatacctgtatcacttgmtaggcattgcgttagaggcaggagttacaaagataaagtagatgttatccctgtcatcaaaagtcttaagtttcatagtggaaagtggaatggggataat

SEQ ID NO: 42710 - DNA, 201 bp, Homo sapiens
tgatacttgaactatttagtttgttattattgaggatattctcataaaggcggaggaaaaatacttttcccaagcaaaatccaagttaaatatgttaaatkaaccaaacactggattgttgaaaaatatttagtcatttattcacctcaattaatgtaactttaggatacagattcttctgtgattttattatcttctcac

SEQ ID NO: 42711 - DNA, 201 bp, Homo sapiens
attaaatttttgagggagcaggacttgaagaaagaccagttaggagtctagtatgacttgagatactttgttataaaggtggttgtttaatgaacacttayatttgccaggaattatgctacttgctttatatgttttttctcatttaatccttaaaattacatcatgaagcagttataatttcccccattttacaggatc

SEQ ID NO: 42712 - DNA, 201 bp, Homo sapiens
ctggccaacatggtgaaaccccgtctctactaaaaatataaaaattagaggggcgtggtggtgcacgcctgtaatcccagctactccagtggctgaggcaygagaatcacttgaacccaggaggcggaggttgcagtgagctgagcgcctgggcgacagagcaaaattctgtctcaaaaaaaaaaaaatcattttagctgc

SEQ ID NO: 42713 - DNA, 201 bp, Homo sapiens
atttaaagcttgagcccgaattggtttttcaagatcattctggctgggcgcattgtctcatgcctgtaatcccagcactttagggagccagccgaagaagscggatcatctgaggtcaggagtttgagaccaacctggccaacatggtgaaaccccgtctctactaaaaatataaaaattagaggggcgtggtggtgcacg

SEQ ID NO: 42714 - DNA, 201 bp, Homo sapiens
agtactgttatgatttcagtttttgcatttaaatttttgttccgtcttatatttattttggtgctagctataaataaaagcaaagagtaagtatatccatrtcatgcatatgttcagtaacttagctctgtctcttcaaatctctttgaagtagatctgtaaataaaactcagctcttcagaaacaaatttcttcatgata

SEQ ID NO: 42715 - DNA, 201 bp, Homo sapiens
tgttattattgaggatattctcataaaggcggaggaaaaatacttttcccaagcaaaatccaagttaaatatgttaaattaaccaaacactggattgttgraaaatatttagtcatttattcacctcaattaatgtaactttaggatacagattcttctgtgattttattatcttctcaccccatttaggttgcgagttat

SEQ ID NO: 42716 - DNA, 201 bp, Homo sapiens
gaccccggacttaagcaacaagcgtggtcttgggcgtagctacgaggtggttggtgggctccagggcctgcgtgcccctcgacgtgagcgatgattggcgrtgcaggataacagatcgccttcttggccactcagtggcaggggacttgctacttccgggtcggcggcgtctggcgtggagagtttggggatctacagcag

SEQ ID NO: 42717 - DNA, 201 bp, Homo sapiens
ggggtgtgtgtggaccagtcaatgaccgcccaagctctccgagtagaaaacccaaacatggttttgtggggtgtgtgcctttgaccccggacttaagcaamaagcgtggtcttgggcgtagctacgaggtggttggtgggctccagggcctgcgtgcccctcgacgtgagcgatgattggcggtgcaggataacagatcgc

SEQ ID NO: 42718 - DNA, 201 bp, Homo sapiens
agtggcaggggacttgctacttccgggtcggcggcgtctggcgtggagagtttggggatctacagcagccaaaggcttgtccctgactttatatggctgckcctggcgagcgactgagtcgtccgtgaggaaaaagaggcgaggcttttccgagatcgtctcagcgatggcgcttcggtcgcagttttgggggttctcggt

SEQ ID NO: 42719 - DNA, 201 bp, Homo sapiens
cattaatatttttcttttctgtgaacagtctgtttggataatgctttgcctattaagttatgaaggggtgggttgcccctcctcacctgtgggtgtttctygttaggtggaacgagagacttggaaaagaaaaagacacaaagtatagagaaagaaataaggggacccagggaaccagcgttcagcatatggaggatcccg

SEQ ID NO: 42720 - DNA, 201 bp, Homo sapiens
ttgcatcgaattgtcttgtccatgcattttgttagtgagattgagcatatttttgtgaatttgagtcattaatatttttcttttctgtgaacagtctgttyggataatgctttgcctattaagttatgaaggggtgggttgcccctcctcacctgtgggtgtttcttgttaggtggaacgagagacttggaaaagaaaaag

SEQ ID NO: 42721 - DNA, 201 bp, Homo sapiens
tctgcttgtgattgacaagggcagtgcaccctacagactattttcattcattcaactccaggcactctcccaggtagctgccatgcggcgggtagaggcarggttcgcggaggggctggaacaaacaacaaataggtgtgatgggggctatttaaagaggatgttacagtagcggacaggatacctgcctgtctgaggtga

SEQ ID NO: 42722 - DNA, 201 bp, Homo sapiens
ccattttacaggatcaaagaaattgaggtttagggagacatgattagtaagtgccagagctaagatttacatatgttttaactgacctcagagccaggacrctaggttattaccactatactacagcatgtaagtgtttatcaggtttatctgctgcttatctgcttggtgaggattttttagaatttcttaaggacttct

SEQ ID NO: 42723 - DNA, 201 bp, Homo sapiens
tcttcatggtagttaagagcattgactctggagccagacactgggacttaaaccatggctccattacttactagttttaatctttttcaagttacttaacstttctgtgttagtttctgcagctaaaaaaaaatatagaaaaaataatagaattgagacataagctttatctataaaccgttaagacaggcctggcatata

SEQ ID NO: 42724 - DNA, 201 bp, Homo sapiens
ggcggcgtctggcgtggagagtttggggatctacagcagccaaaggcttgtccctgactttatatggctgcgcctggcgagcgactgagtcgtccgtgagraaaaagaggcgaggcttttccgagatcgtctcagcgatggcgcttcggtcgcagttttgggggttctcggtttgcaggaaccctggtaattagtcttgcc

SEQ ID NO: 42725 - DNA, 201 bp, Homo sapiens
gctgggtgacagtgagaccctgtttctgaaaaataataaaagccatatgacatggtttgatgtcatatttaaatatgcataccttgagattataaaaaaawttctcatgttttcttctagtactgttatgatttcagtttttgcatttaaatttttgttccgtcttatatttattttggtgctagctataaataaaagcaa

SEQ ID NO: 42726 - DNA, 201 bp, Homo sapiens
aaaccctgtctctacaaaaaaatacaaaaattagctgggtgcagtggcatgcgcctgtagtcccagccacttgggaggttgaggtggaaggatgacttgawcccaggaggcagaggctgctgtgagccaagttcgtgcctctgtactctagcctgagagacagaggcagaccctgtctcaaaaaaaaaaaaaaatggccat

SEQ ID NO: 42727 - DNA, 201 bp, Homo sapiens
cttcatgatacttgaactatttagtttgttattattgaggatattctcataaaggcggaggaaaaatacttttcccaagcaaaatccaagttaaatatgtdaaattaaccaaacactggattgttgaaaaatatttagtcatttattcacctcaattaatgtaactttaggatacagattcttctgtgattttattatctt

SEQ ID NO: 42728 - DNA, 201 bp, Homo sapiens
tgatgactcttaacgagcatgctgccttcaagcatctgtttaacaaagcacatcttgcacaacccttaatccatttaaccctgagtttgacacagcacgtrtttcagagagcagggggttgggggtaaggtcatagattaacagaatctcaaggcagaagaatttttcttagtacagaacaaaatggagtctcctatgtct

SEQ ID NO: 42729 - DNA, 201 bp, Homo sapiens
agctactagggaggctgagacaggagagtggcgtgaacctgggaggcggagcttgcagtgagccgagatcgcgccactgcactccagcctgggcaacagastgagactccgtctcaaaaaaaaaaaaagagattgtgattttttactagagccaccaggaaaaccaggagtagactccatatttccaaatctaatgcctct

SEQ ID NO: 42730 - DNA, 201 bp, Homo sapiens
ggatcacgaggtcaggagatcaagaccatcctggctaacacggtgaaaccccgtctctactaaaaatacacaaaaaaattagccaggcgtggtggcaggcrcctgtagtcccagctactagggaggctgagacaggagagtggcgtgaacctgggaggcggagcttgcagtgagccgagatcgcgccactgcactccagcc

SEQ ID NO: 42731 - DNA, 201 bp, Homo sapiens
tgtttttactttttttaagttaaaaaaaaaatcaaaagaatattttgtggcttgggaaaattaaatgaaaatcaaatttcgttgcccaggttcttagaacmtagctgtacctactctcatttgtttacgcatcacctggctgttctagcactacaatggctgagtcgaacagtttcaacagaagctattggacctagaaag

SEQ ID NO: 42732 - DNA, 201 bp, Homo sapiens
gtagagatggggttttgctgctgcccaggctggtctcgagctcttgagctcgagagatctgcctgattcagcctcccaaggtgctgggattacagacgtgrgccactgcactcggccccaacgcattactttgatttaatatttggatcattaaaaataactaaagatgtatttcctcattttttctctgtctgccttact

SEQ ID NO: 42733 - DNA, 201 bp, Homo sapiens
tttttgtagagatggggttttgctgctgcccaggctggtctcgagctcttgagctcgagagatctgcctgattcagcctcccaaggtgctgggattacagrcgtgagccactgcactcggccccaacgcattactttgatttaatatttggatcattaaaaataactaaagatgtatttcctcattttttctctgtctgcc

SEQ ID NO: 42734 - DNA, 201 bp, Homo sapiens
ggcctgcgtgcccctcgacgtgagcgatgattggcggtgcaggataacagatcgccttcttggccactcagtggcaggggacttgctacttccgggtcggyggcgtctggcgtggagagtttggggatctacagcagccaaaggcttgtccctgactttatatggctgcgcctggcgagcgactgagtcgtccgtgaggaa

SEQ ID NO: 42735 - DNA, 201 bp, Homo sapiens
tggtcttgggcgtagctacgaggtggttggtgggctccagggcctgcgtgcccctcgacgtgagcgatgattggcggtgcaggataacagatcgccttctyggccactcagtggcaggggacttgctacttccgggtcggcggcgtctggcgtggagagtttggggatctacagcagccaaaggcttgtccctgactttat

SEQ ID NO: 42736 - DNA, 201 bp, Homo sapiens
cccggacttaagcaacaagcgtggtcttgggcgtagctacgaggtggttggtgggctccagggcctgcgtgcccctcgacgtgagcgatgattggcggtgmaggataacagatcgccttcttggccactcagtggcaggggacttgctacttccgggtcggcggcgtctggcgtggagagtttggggatctacagcagcca

SEQ ID NO: 42737 - DNA, 201 bp, Homo sapiens
gctgggaagttagcaagaacaaatcaatttatttctgtcttttggaaggtgaaagtattttcagcctactcgtgctgctgacttaatcttttccttttttwtctgattttcaaaaccagatgaaacgactacaaagtgccatgacagaaggtggtgtggttctacgggaacctcagagaatctatgaataaatggaagcat

SEQ ID NO: 42738 - DNA, 201 bp, Homo sapiens
ctgactttatatggctgcgcctggcgagcgactgagtcgtccgtgaggaaaaagaggcgaggcttttccgagatcgtctcagcgatggcgcttcggtcgcrgttttgggggttctcggtttgcaggaaccctggtaattagtcttgccccccttctcccagctcactcgcctgggcttgcacagtacattggaacgtgcgg

SEQ ID NO: 42739 - DNA, 201 bp, Homo sapiens
ttaagatcactttctgaaaaactgttgtaggctgggaagttagcaagaacaaatcaatttatttctgtcttttggaaggtgaaagtattttcagcctactygtgctgctgacttaatcttttccttttttttctgattttcaaaaccagatgaaacgactacaaagtgccatgacagaaggtggtgtggttctacgggaac

SEQ ID NO: 42740 - DNA, 201 bp, Homo sapiens
gtgctggcacagagatgcttagaggcgggaatcaacttcatggtctaccaaccaaccccgtgggaggcagcctcagactcggtatttttgttttcatgtayttattgaaaaggtattgtgttaattcttggcattggataacttacataataataacagtttttacttaccaaatactttccatgtgtcagaccctttggt

SEQ ID NO: 42741 - DNA, 201 bp, Homo sapiens
gtggagcacatatgaggttgatgtaaagcacttattactgtgtctagttcatggcgagtgatctcagtgaatgacagttgtttgctgctcggagtgtgggktgttttttaaaataggaaatgtcagtatcaatctaatattatagaacagtcagtatgtgaaaatgaaaggaccaaatgccaacctcacttggactcttgg

SEQ ID NO: 42742 - DNA, 201 bp, Homo sapiens
ggaaaagggaaagaagtcatttatttgcttcgttttgcctttttccagtgtaattgattttaagatagaactgaaagaatattcaacacacactctctctcttttttttttttccttaaacagaactttattttctcacagttctggaggctagaagttcaagatcaagatgtctgcaggtttgctttcttctgaggcctc

SEQ ID NO: 42743 - DNA, 201 bp, Homo sapiens
gggcctacaggcgcacatcaccacgcccagttaatttattataataataataataattattttgagacggaatctcgctttgtcaccaggctggagtgcartggtgccatctcggctcactgcaacctccaactcctgggtttaagcgattctcctgcctcagcctccccagtagctgggattacaggcatgcgccaccac

SEQ ID NO: 42744 - DNA, 201 bp, Homo sapiens
tagctgttcatggaagggtaagaggtctgagacaggcactgaagagggccagttgctgggacagtgtccattcctacgctgccagacgtgagggatggctragtccttttggactctattgctgtgggtgttctgggctgtgggaatcagtaggtctgatcccaaatggcagtttctgtgccgtcccacacggtctgctgg

SEQ ID NO: 42745 - DNA, 201 bp, Homo sapiens
gaatcactggagtttccttgggtgaggccctagagctggtagtttggcttctaatgctgaggcctaaagcataattgttgacgggtggttctggagcgatktgtgcaaaaccagtgaaagatgaacactgggccattttaagatggaaacaaggtgggggttggatagagagttatatgcagcctcttttgcacctcgttg

SEQ ID NO: 42746 - DNA, 201 bp, Homo sapiens
agtgcagcaacacatttctctgacatcagctgcttgaggaatgaatttttgaaaggagttactaaactgtaactgaatatttgtattaacttaaaaaaaawtgaatcgtaagcctgctgctgttgagacagatgatccgaattggtctttttatctttcctgtgttttggttgtcttcagttattttctggtcacttttta

SEQ ID NO: 42747 - DNA, 201 bp, Homo sapiens
taatgaaacttctaggtctatttctagctcaatgtaagacggcatttagttaccataaggacaggttagatagaatctcttccatttagcttttgtatttgtctctcaaagcagatagggtaaccccaaaacttaggaaaacaatgtattttattaaagaaaaataagttaaaacccagtagacacacctacgagatgctt

SEQ ID NO: 42748 - DNA, 201 bp, Homo sapiens
agtgacttaaaaaattttactgttggtctgtgttaatgagaaactgtccttttttgagagggagcctccctctgttccccagggtggagtgcagtggtgcratcttggctgactgcaacctccgcctcccaggttcaagtgattctcctgcttcagcttcccaagtagctgggattagaggcgcccaccaccacgcccggc

SEQ ID NO: 42749 - DNA, 201 bp, Homo sapiens
tgatgtgatctcggctcactgcagcctcgatctctcaggctcaagtgattctctcgcctcagtctcccttaaaaattgttaaaaaataatttggaacttcrtgtgtcttttgtattgcttgatagcagcatagaatatgtgaggtatttttggctactttgtgaattagccttttcatctctcatttctgagtgctagatc

SEQ ID NO: 42750 - DNA, 201 bp, Homo sapiens
taccagagaaacggagtctgaaactcttgaagagccacaatctcaatgtgaattggtacatgtactgccccgagagcgccgtgatcttgctgtctaccacrgtcctggagaatgtcctgcagccttttcactttagggtaagaggaagcctcccctgaaaaaaacacctttccccagttgtcccctgttcctgtagcatcc

SEQ ID NO: 42751 - DNA, 201 bp, Homo sapiens
cctttccagtgttaagtgagtcagacagagcatcgctgcccgtgatagccactgtttttgataaactcaaccatgagtataaaaagtacctggatgccgascagagttatgcgatggtgagttacatggagtatgacaaagggtcctcctcccccaccccctcccgggtattttctaagtaattatgatgcaaaattgttt

SEQ ID NO: 42752 - DNA, 201 bp, Homo sapiens
gggtccacatcgaagaattcagtccttgtggatgaactgtaaacagcacccttcctctaagatgccgaagatcatagtttgtggtttttttctttcaggcrgtggaagcagggcagagccgaagcagcccgctcctcaagaggccggtgcggacccaggcggtgctggaccagtcagatgtgtacacccatgtcctgtcag

SEQ ID NO: 42753 - DNA, 201 bp, Homo sapiens
ggtcctgaagtcctcctccgggcagctgtgaataacactccgagagccaccccgcaggcagcttccctgactgtccaggggcctcgcgtttagcgtggacycagtacatggtgggcaggggcgagtgctagcggaaactgggtttgctttttgttttcatcttttcctggtttagaatttcctataacatgtggattcttc

SEQ ID NO: 42754 - DNA, 201 bp, Homo sapiens
cctgctatagcttttttttttttttttttttttaaccgtaaccagaaaggggttgcgaatgacatctagctgtcaggtctttaaagtattgtatttcttaragtgtcctttaaaggtacttttgcattggtaaccttttgagattagtttttatcatagcaacgtgtggaaattctgaagctgacatgaagttggtttgat

SEQ ID NO: 42755 - DNA, 201 bp, Homo sapiens
atctaagtagagaaagtgttttccgctcatatcctgggtccacatcgaagaattcagtccttgtggatgaactgtaaacagcacccttcctctaagatgcygaagatcatagtttgtggtttttttctttcaggcggtggaagcagggcagagccgaagcagcccgctcctcaagaggccggtgcggacccaggcggtgct

SEQ ID NO: 42756 - DNA, 201 bp, Homo sapiens
aaaaaattgaatcgtaagcctgctgctgttgagacagatgatccgaattggtctttttatctttcctgtgttttggttgtcttcagttattttctggtcaytttttaagttaatatttatttttcttgtcttgtagtatgccaacgtaggttggcagtatgctgcctaatccaaatttgtgtgtgtctgtgtgtttttcct

SEQ ID NO: 42757 - DNA, 201 bp, Homo sapiens
taggtcactttgagtgagctcatcaaaggaagcatgtcataaatgcaggaaatacttgtgagaggagataaaaatattaaaagagagttgtgatgttaatsacaaattccttctcaagtaagagctagcctgtagggaggaaatgcaaacacaggcttttaaactgatttaaacagcaagatgggatggaatgaaagcaac

SEQ ID NO: 42758 - DNA, 201 bp, Homo sapiens
cctcaaaacgatccgcccgcctcagactcccacagtgctaggattacaggcatgagccgctgcacccggcctgagcaaggttttaaagtatggatggggtkcgagcatggtgttttggggaactctgggtctgtgtaactgaaggttacatagggtgtctccacagggaaggggaaatggtggtggtgtggccactggcag

SEQ ID NO: 42759 - DNA, 201 bp, Homo sapiens
aaacgagtgagcccgtgataatctagattgggggctctaagaagtttgtgggtggggggaaggtactgaatttaacttaaaaagagtttttagactgggcrcggtggctcatgcctgtaatcccagcactttgggaggccgaggcgggtggatcacttgagatcaggagttcgagaccagcctggccagcatggtgaaacc

SEQ ID NO: 42760 - DNA, 201 bp, Homo sapiens
gaaaaaaaaaaaaaattggcaaaatgtctgaataagactagaaagtgcatttttatgctaagagttttggtcttccagatggaaatgggtttggtagtctyaagtagtttagaaaaaagtgattgtgtcagttgattaaagataattcaaaactatttcagaaactaacgcttgagatttgaccttggaagaaggtgggaa

SEQ ID NO: 42761 - DNA, 201 bp, Homo sapiens
acttctgattcttctgtggcctaaaacagtggcccaaactttcaaactttatggtagttagtataatgttctttcatttcttcttcctttttttttaaacrtactcttctgtggcattcctgtttatttttaaattttttttggagagtgtcgctctgttgcccaggctggagtgcagtgttacaatctcagctcaccaca

SEQ ID NO: 42762 - DNA, 201 bp, Homo sapiens
cctcagcctcccaaagtgttgggattacaggcgtgagccaccacgcctggcagtacggaggtatattttcatttgaaaaagtggatatctcagtttttaartttgtaatgaaaattttaaacacacaatagagactaataaaaaagaacccctgtatgcctgtatctgattcgacaatagtcaaaattttgcttctaagtt

SEQ ID NO: 42763 - DNA, 201 bp, Homo sapiens
ttagctgttcatggaagggtaagaggtctgagacaggcactgaagagggccagttgctgggacagtgtccattcctacgctgccagacgtgagggatggcygagtccttttggactctattgctgtgggtgttctgggctgtgggaatcagtaggtctgatcccaaatggcagtttctgtgccgtcccacacggtctgctg

SEQ ID NO: 42764 - DNA, 201 bp, Homo sapiens
aagagttatgggcaaaaatcagggaacattgtatttaaaagaaaatttgttttgttaattagtaaacattccggggaacgttcattaaagaatgacaaacygcagagtttgtgaagcttttgaagagagttatatgtgttttttcttattaattaaaaatatttttaaaaaatttttcttagactaagaatgccaacattc

SEQ ID NO: 42765 - DNA, 201 bp, Homo sapiens
ccccgaaaagtttccttgggcccttctgtaatccatcccttgagttttttttttttaaatgaatttttaatttaaaaaatgtatgtattggaatagagacrgggtctcactgtgttgctgaggctggtctcgaattcctgtgatcctcctgcttcatcctctcacagtgctgggattacaggtgtaggccgctgtgcccag

SEQ ID NO: 42766 - DNA, 201 bp, Homo sapiens
actctgtatcctttactaaggtgtggcaccgtgcacaacagggcaagtggtcaccctcagagagtggtcctgaagtcctcctccgggcagctgtgaataamactccgagagccaccccgcaggcagcttccctgactgtccaggggcctcgcgtttagcgtggactcagtacatggtgggcaggggcgagtgctagcggaa

SEQ ID NO: 42767 - DNA, 201 bp, Homo sapiens
aggcgaaccctgtcaactgcgtcttcttcgatgaggccaacaagcaggtccggcgcgcccgcgcttcctcccccgcgcggccctgccggggtcgtgggcgygccaaggccggtcccgcgcgaccaggcccgagcgtcccctcctgtcctgtcccgtcccgtcccagcgcgggaggcggcgcgcgctccttccttgttgggt

SEQ ID NO: 42768 - DNA, 201 bp, Homo sapiens
cagcccgctcctcaagaggccggtgcggacccaggcggtgctggaccagtcagatgtgtacacccatgtcctgtcagccttcgtggaaaagaaggtgggcygcagctttccgcctcttctggactgagaatgctcaaaacaaggaagttgctgaaaacgaggagacttcatgtgattagagtcacttgaagtgattagaat

SEQ ID NO: 42769 - DNA, 201 bp, Homo sapiens
tcaagggtttagacgtcgagattttcattttccttgaaattttgtaaagggggaaaagactgtacttcaggcgtatcagcggcgccgatgcgcgaaccggygttagaacttggagcctcgggaacccgacccggtgtcacggtggcatccttttcgctctctgctcttggtttttaaaattcacctgagcagccaaacatc

SEQ ID NO: 42770 - DNA, 201 bp, Homo sapiens
  misc_feature (1)...(201): n = A,T,C or G, or insertion/deletion polymorphism (see Tables 1-2)
aagcagggcagagccgaagcagcccgctcctcaagaggccggtgcggacccaggcggtgctggaccagtcagatgtgtacacccatgtcctgtcagccttngtggaaaagaaggtgggccgcagctttccgcctcttctggactgagaatgctcaaaacaaggaagttgctgaaaacgaggagacttcatgtgattagagt

SEQ ID NO: 42771 - DNA, 201 bp, Homo sapiens
attagaataaggtcgctgagatttgccgcctgccatagggcaaggtggcagtagtgggggatagtggaggagtagtaaattcagggtccctgcatcccackagctggcggctgcatctcacttcataccttcactgtttttgtttttcccatctgtgtttgatcttgcctgtagatccttggtctactgttatagatgaga

SEQ ID NO: 42772 - DNA, 201 bp, Homo sapiens
aggggaatgttgtatataaacttttgcagctagctttttttttttttgtccaaagtgtatcttggacatctttctatattttattctgactgggtagtatyccactgtatggatggactgcagtttaaaaattttcttgttattggacattggctggttttccatttttttgtgattacaaataacccttcagtaacatgc

SEQ ID NO: 42773 - DNA, 201 bp, Homo sapiens
gcatagtcccagttcgcactgttgaacaggtttaatgatcaacagcagggcctttcactttcagaagtgtctcgatttggatgataagctatctggccacygtaacactggtgcttacagaaggtgaaagtataatgtaggccctcaattcagtagtgacttaaaaaattttactgttggtctgtgttaatgagaaactgt

SEQ ID NO: 42774 - DNA, 201 bp, Homo sapiens
ttggatcccagttgtagccagggacgttttcaaggtgaatctcttagaaatgacccctcctttcaagcgtgggaatgggatttttttttttcactttatamgttttttactatatgtgcattttatcaagaacatatactacttttaataattaaagcaacaactaagaatgccattctcctgcttaagcccattctggaa

SEQ ID NO: 42775 - DNA, 201 bp, Homo sapiens
gctggaatacacacaggagtgcaaggtatgaccccaggccctttctcagctgctggtgtcagtggtgttgagctgggttatgtagtggagagcggggcatyggggtcgcagggagcacagacttgaagtcagactgtccctcatgttgattcccaaactggagtcaggcggggtgtttgctttgtgacactgaacagtttt

SEQ ID NO: 42776 - DNA, 201 bp, Homo sapiens
ttttctgactgcatcgttgcacttatgttttctcaatttgtaggtcctgctgccgtgaccagccagtctcctgttccatgtaaactctgtatcctttactraggtgtggcaccgtgcacaacagggcaagtggtcaccctcagagagtggtcctgaagtcctcctccgggcagctgtgaataacactccgagagccacccc

SEQ ID NO: 42777 - DNA, 201 bp, Homo sapiens
gcataattgttgacgggtggttctggagcgatgtgtgcaaaaccagtgaaagatgaacactgggccattttaagatggaaacaaggtgggggttggatagrgagttatatgcagcctcttttgcacctcgttggtatttgtaagaccacatttttttctccctaggagatgcctcataaatttgtgatagccgtgctgatg

SEQ ID NO: 42778 - DNA, 201 bp, Homo sapiens
atggatgacagtgctgggggataatggttttgaggccgtgtggaccaggacaactagaatgggtcctgtgggctgggcctctgatataaagaagctgcttmcctcctctaccctcccagagggtggtgacgctaactctgtgacacgtgaggatgtttccagttgaaatgacagagatctgcttaggtcactttgagtgag

SEQ ID NO: 42779 - DNA, 201 bp, Homo sapiens
ttgattaaagataattcaaaactatttcagaaactaacgcttgagatttgaccttggaagaaggtgggaatccgctccattccacgagtacttgaactctstgttgcaattgtgagcatggatgacagtgctgggggataatggttttgaggccgtgtggaccaggacaactagaatgggtcctgtgggctgggcctctga

SEQ ID NO: 42780 - DNA, 201 bp, Homo sapiens
cataaatgcaggaaatacttgtgagaggagataaaaatattaaaagagagttgtgatgttaatgacaaattccttctcaagtaagagctagcctgtagggwggaaatgcaaacacaggcttttaaactgatttaaacagcaagatgggatggaatgaaagcaactgggcaaaccatgattgattttggcctcagtcttgtc

SEQ ID NO: 42781 - DNA, 201 bp, Homo sapiens
caaagacatggaatcatcctaaatgcccatcagtgacagattggataaagaaaatgtggtacatatataccatggaatactatgcagccataaaaatgaayaagatcatgtcttttgtgggaacatggatggagctggaggccatcatccttagcaaactaacacaggaacagaaaaccaaataccacatgttctcacttc

SEQ ID NO: 42782 - DNA, 201 bp, Homo sapiens
gtcaccctcagagagtggtcctgaagtcctcctccgggcagctgtgaataacactccgagagccaccccgcaggcagcttccctgactgtccaggggcctygcgtttagcgtggactcagtacatggtgggcaggggcgagtgctagcggaaactgggtttgctttttgttttcatcttttcctggtttagaatttcctat

SEQ ID NO: 42783 - DNA, 201 bp, Homo sapiens
gcaagactccgtctcaaaaaaaaaaaaaaaaagatttttaaaagcagctttattgaggcatagttgacacataataaactgtacacacttaatattatgcmatatgtgagttttgacatgtatacacccatgaaaccatcaccacaatcaaggcaatgaacatgttcagaccccgaaaagtttccttgggcccttctgtaa

SEQ ID NO: 42784 - DNA, 201 bp, Homo sapiens
gacctccaacagcacaggagcggaggtggtcctctatcatctaccacggtagatttcatgctttgttttccctctctctctgattttaaaatgtgaactgyagcttgttgatctgttttttgctttctatcctacagagaaggtgcctgtaaaaagatgcacatattgaagttaaataggacgggaaagtttgccctgaac

SEQ ID NO: 42785 - DNA, 201 bp, Homo sapiens
aatttagaatgtatggttagagaaaatacacctgtgtgttaatgccatggtgctttgctgtaaggccatcatcgaaatcttagtaatgactggctgggcayggtggctcatgcctgtaatcctagcactttgggaggccgaggtgggcgatcatctgaggtcaggagttcgagaccagcctggccgccatggcgaaacccc

SEQ ID NO: 42786 - DNA, 201 bp, Homo sapiens
ctcagtcttgtctttttcccccccagacatcggtaatattcgatatcaagttacggggagagtttgacggctccgttaccttccaccaccccgtgcttccygctcgatcgatccagccctatcagatccccatcacaggtaacacgggttctgtagaggagtctgtgctgccctttcaccatgtggctgtgttctcaccat

SEQ ID NO: 42787 - DNA, 201 bp, Homo sapiens
tggctgtaggtttgttactgtaacctgggatcacttttctctttctcacattccgtgtgacagtgatgatgaatattgcattctttgggactgacagtcamagtaagtgcttcggctgtggctcttaggcttacccaaatcagtcctccttctgtctggagaggtggggttgggaagtcagaagagtggaggtcaggaatt

SEQ ID NO: 42788 - DNA, 201 bp, Homo sapiens
tcatctttggagaaatgactaattcgggtcattgtgcctatttttaaaatcaaattactattatttgttgaattgtagttctttatatattctgatattarcaccttcttagagatacaatttgcaagtattttctccgaatccggaggttgcctttccactctgtggattgtgtcctttgatgtacctgcctgtttcttt

SEQ ID NO: 42789 - DNA, 201 bp, Homo sapiens
tgtgttggttagaatagccagtccttggggagcctctagtctgttgtagctgaatgatttggaagtgttctttcactttttacttttgtcctcagcattayctacatgaacttgttatcaaaacccttgtccagcacaacctcttttatatgctgcatcagttcctgcagtaccacgtcctcagcgactccaaacctttgg

SEQ ID NO: 42790 - DNA, 201 bp, Homo sapiens
ggcagcttccctgactgtccaggggcctcgcgtttagcgtggactcagtacatggtgggcaggggcgagtgctagcggaaactgggtttgctttttgtttycatcttttcctggtttagaatttcctataacatgtggattcttcatcttggattgtctttcaacctgacatcattatcagcgcaagccaaggtaggtcag

SEQ ID NO: 42791 - DNA, 201 bp, Homo sapiens
cattttcagaggttagtgactctccttttgtttcctgctgggctgtgagccctggcggcttgatgcatccgtgtgtcttgcccactgtgctgccactgggtgggcgtgctcaggaattgaatgggcctgttgagaaagatataaccagcacttttgggaagagtcagccaccctttttctttttgttttgggcctgttaga

SEQ ID NO: 42792 - DNA, 201 bp, Homo sapiens
agcccaacacaaattcttaaactttcttaaaacattatgagatttttttaatgatattttttaagctcatcagctattgttagtgttagtgtattttatgygtggcccaagaccattcttcttcttcctcttaaggcccagggaagccaaaacattggacacccctggcttagaaccttcagctctgttccggtggtacag

SEQ ID NO: 42793 - DNA, 201 bp, Homo sapiens
tgggtctcaatctgactacatattaggatcatctggggggccttaaaaatgaaagctctcacctgacagtgtgtaggtcagccacccaaaggtgagggctrtgcactcggcgcagaccttgacacttaggtccaaagcgcgagtgctcttcgccaaagcttgtctgcctgggctctttcctacctttgggtggtctgttca

SEQ ID NO: 42794 - DNA, 201 bp, Homo sapiens
gcttataatcccagcactctgggaggctgaagcaggaggattgcctgagcctaggagttcgagaccagcctggacgacaacatggcaaaaccctgtctctmcaaaaaaaaaaaaaaaaaaaaaaaaaattagctgagtttggtggtatacacctgtggccccagctactccagaggctgccgagggaggattccttgagcc

SEQ ID NO: 42795 - DNA, 201 bp, Homo sapiens
ttcagtccttgtggatgaactgtaaacagcacccttcctctaagatgccgaagatcatagtttgtggtttttttctttcaggcggtggaagcagggcagarccgaagcagcccgctcctcaagaggccggtgcggacccaggcggtgctggaccagtcagatgtgtacacccatgtcctgtcagccttcgtggaaaagaag

SEQ ID NO: 42796 - DNA, 201 bp, Homo sapiens
gtgcccttttctgttctgcatgagcccgggaggtgtgctcctctttctggccttgctgaggaagcctcctcagtctgttaattgtctcttcctgggtaatytctttattagagaaatcttttttttttttttttttttttttgagacggagttttgctcgttgcccaggctggagtgcaatggcgtgatcttggctcactg

SEQ ID NO: 42797 - DNA, 201 bp, Homo sapiens
gggtattttctaagtaattatgatgcaaaattgtttcctatatattagaataaggtcgctgagatttgccgcctgccatagggcaaggtggcagtagtggkggatagtggaggagtagtaaattcagggtccctgcatcccacgagctggcggctgcatctcacttcataccttcactgtttttgtttttcccatctgtgt

SEQ ID NO: 42798 - DNA, 201 bp, Homo sapiens
cattctcctgcttaagcccattctggaaaagccagactccaccccagggtggatggaaagccggactccaccccagggtgtctccctcatttctcccatcraccttcccaccggtgtccgtgcccttttctgttctgcatgagcccgggaggtgtgctcctctttctggccttgctgaggaagcctcctcagtctgttaat

SEQ ID NO: 42799 - DNA, 201 bp, Homo sapiens
gaacgctgaggcaggagaatcacgtgaacccgagaggcagaggttgcagtgagccgagatcatgccactgcactgtagcctgggcaacagagcaagactcygtctcaaaaaaaaaaaaaaaaagatttttaaaagcagctttattgaggcatagttgacacataataaactgtacacacttaatattatgcaatatgtgag

SEQ ID NO: 42800 - DNA, 201 bp, Homo sapiens
ttagtctcttgctggggattttattctttttttttttttttataattgcaagtaataaattaaaaaaaaaaaaaagaaaagaaaaagggcttggtggcccrtgcctgtaattccagctctttggaaggccaaggtgggtggatggcttgagtccaggagtctgagaccagccaggccaacatgatgaaatcccatctctat

SEQ ID NO: 42801 - DNA, 201 bp, Homo sapiens
tggctactttgtgaattagccttttcatctctcatttctgagtgctagatctgataggagcagatattccaagttgaagcagcctacaggcactttagccygtgtaaatgttcaccattgccgtttgtagagtagagggaaggctgttagaaacaggcagaatcctctgttagtttcttccatcagttttaagtgttaaag

SEQ ID NO: 42802 - DNA, 201 bp, Homo sapiens
ctgactgccctgtcttgctggaccagccaaaagcttagttactttctggcacagttggaggaaggagctggttcttaacagacgttcaattaggtcttttkgctttctgtgttctttcaagcttcttccttttcctttgtaaataatgttagtattgaaagaatagattttgccaagtgattgtcttgtgtctgctgccca

SEQ ID NO: 42803 - DNA, 201 bp, Homo sapiens
ttttgtccaaagtgtatcttggacatctttctatattttattctgactgggtagtattccactgtatggatggactgcagtttaaaaattttcttgttatkggacattggctggttttccatttttttgtgattacaaataacccttcagtaacatgcttgtacacacttctttatattagagggagagttgcagtatagg

SEQ ID NO: 42804 - DNA, 201 bp, Homo sapiens
tctctcccggctctcttttgaaggagattggagtgcagaattggctagtctgaggtttcagtgtgcaagacgtagtcagatggctcacatttggaaccctrgtagtaatgttttattctttgtccgatggcattgggcgggttgacccagcctgcagtcaggatttccttgtaccgttcacccgggagttcagaatcgcac

SEQ ID NO: 42805 - DNA, 201 bp, Homo sapiens
aacgatcatgagtcatctttggttattaaaaataacccaaaccacagtgattgaagccttgacatgctttctttttcttggtgagattttcctggattgtyagctccttcccccttcctccccgtacgtgctttcagtgagacggaacagttcatttcttccttgactacaattgaataaacatttcgtaatgacattaaa

SEQ ID NO: 42806 - DNA, 201 bp, Homo sapiens
ttttgccaggggccatttgttccagttttgttgttgttttgagacagtctcactgagtcacccaggctggtaggtagtgtcgtgatcttggctcactacartctccacctcctgggttcaagtgattatcctgcctcagcctcccaagtagtggggattacaggtgtgtgccaccgtgcccagctaatttttatatttttt

SEQ ID NO: 42807 - DNA, 201 bp, Homo sapiens
ctgagctttagaatggatagttttgattagccgttgatggtgaaatatgttttaatattgaatacacccgtaacgttttctgtttgccttagctctgtaaygctgaaattaactttggctgtaggtttgttactgtaacctgggatcacttttctctttctcacattccgtgtgacagtgatgatgaatattgcattcttt

SEQ ID NO: 42808 - DNA, 201 bp, Homo sapiens
catgctttctttttcttggtgagattttcctggattgtcagctccttcccccttcctccccgtacgtgctttcagtgagacggaacagttcatttcttccktgactacaattgaataaacatttcgtaatgacattaaaaagtattgacttttgtgtcataagtaccagcatttgcagcattttctgactgcatcgttgca

SEQ ID NO: 42809 - DNA, 201 bp, Homo sapiens
ccctgggataacacatcctggcgccttagaagaaaaggaatgtgtggagcagaaataagaatgcaaacaaagaccgttatgagcttcttttcaccaaagargcatattcctggaaagttgtgtgcacaatgaattgaggtgaatcttttttgtttttgttttttgtttgtttgttttttgagacagagtctcactctgttg

SEQ ID NO: 42810 - DNA, 201 bp, Homo sapiens
ctgccctcatgctcacagataggaaactgagatgggggaaaggaagcaaagtgatcacccaaggtcaccagcaagttggcggccgagccacttttccatcytctcacccagcttcttccgtgtcccccgcctccccaggtaccggtccgtagtggatctcatgaagtcctggtctgaggagaagtggcattacttgtttcc

SEQ ID NO: 42811 - DNA, 201 bp, Homo sapiens
tttcaatccaggtctgcctgctgccacctggcaccatcacaactgtaaccatcacaatcccctacccaagaattttggctccccacactggggacctgcakggggtgcgtggctggtgctttctatgctattgtctctttaccctaaggtcttgactgacacacccacagcatcctccacaagcccctggaggcaggcttg

SEQ ID NO: 42812 - DNA, 201 bp, Homo sapiens
tgcacaaggcagacctgtgactcctccatccagctatgcccctgctgcccagcaccgtgggcctggcaggcctgctcttctgggctggccaggcagtgaaygccttgataatgcctaatgctaccccagccccggcccagcccgagagcacggctatgcggctcctgagtggcctggaggtgcccaggtaccgccggaagc

SEQ ID NO: 42813 - DNA, 201 bp, Homo sapiens
tcctgagtggcctggaggtgcccaggtaccgccggaagcgccacatctctgtgagagacatgaatgccttactggattatcacaaccacatccgggccagygtgtacccacctgccgccaacatggaatacatggtgagtccccgtacctgccccccaccccccgcagtgtcccttccggcaaacgcagccggactcatct

SEQ ID NO: 42814 - DNA, 201 bp, Homo sapiens
ccagcccgagagcacggctatgcggctcctgagtggcctggaggtgcccaggtaccgccggaagcgccacatctctgtgagagacatgaatgccttactgrattatcacaaccacatccgggccagtgtgtacccacctgccgccaacatggaatacatggtgagtccccgtacctgccccccaccccccgcagtgtccct

SEQ ID NO: 42815 - DNA, 201 bp, Homo sapiens
cttccaggcagccggctctgattgcacaaggcagacctgtgactcctccatccagctatgcccctgctgcccagcaccgtgggcctggcaggcctgctctkctgggctggccaggcagtgaacgccttgataatgcctaatgctaccccagccccggcccagcccgagagcacggctatgcggctcctgagtggcctggag

SEQ ID NO: 42816 - DNA, 201 bp, Homo sapiens
agagggggtttctccatgttggccaggatggtctcgaactcctgacctcaagtgatctgcctgcctcagcctcccaaaagtgctgagattacaggcgtgarccactgtgcccaagcggatatcttacatattaaaattatgcatattttcacgatttaaaaaagcttttgacttaaccattttcaatgttaaaataaacac

SEQ ID NO: 42817 - DNA, 201 bp, Homo sapiens
tttccagacttgtggatttcacaggcctataaaattgcaaaaagaaatctgtgagactgccacacaattgtcagatttttattttgccaaataaggatgtyagaaaaacaactaccttcccatcctcgccattctgccatcaccccggggagagtgggaaagaattaaggccagtcccttcaagtgagctcagtggaaatt

SEQ ID NO: 42818 - DNA, 201 bp, Homo sapiens
gccccttccttcacgaaggtgacattttagtgggaataagagaaaacaagcatgaacaacaagatattaatgtacataagataacgtgaggaggcaatacrgtgttgggaggggcgggaataagagccgggatggcaggcagctagagtgcaggggagtcattgacttgttcattcattcgttagcacctagaatgccctc

SEQ ID NO: 42819 - DNA, 201 bp, Homo sapiens
cgctaattttttgtagagacggtgtctcactatgttgcccaggctggtcttgaactcctaggctcaagcagtcctccttccaaggtctcccaaagtgctgsgattacaggcgtgagccaccctacccagcccaataatccttttcctttacccaagtttgagaatcactgggaaatagacaggattgacacaggtggaaag

SEQ ID NO: 42820 - DNA, 201 bp, Homo sapiens
ccactgcactctagcctgggcgacaatgcgagactctatctcaaagtaaaataaaataaaataaataaaataaaataaaataaaataaaataaaataaaataaaaatagcctctgtggtgccttgcccatagtacatgctaaataaatggtggccatgactagaaccaagttataaactcttgggcatgggaaatcgaccg

SEQ ID NO: 42821 - DNA, 201 bp, Homo sapiens
agcaccagcctctgagagccgtgaatggtcactcagagccctacagagcagacatcgggtgattcagtcctgcctccatttcactttccctctcccccgcygctgaactcttcctgccagactccacccctacccatggccaccatttgagaggctcacagagagaaagaaagcagtgttagacacgaagctgtgctgtcg

SEQ ID NO: 42822 - DNA, 201 bp, Homo sapiens
tccgtctcaaacaacaacaacaacaaaaacaaaacaagaacaaattctaagtaaacatgatatttagaatttctttttttcttttttcttttttttttggsgggggacgaggtcttgctctgtcgcccaggctggagtgcaatagccagatcatagctcactgcagcctccaactcctgggttcaagcaatcctcccgcct

SEQ ID NO: 42823 - DNA, 201 bp, Homo sapiens
cctgtgaggcagggccactgccctcatgctcacagataggaaactgagatgggggaaaggaagcaaagtgatcacccaaggtcaccagcaagttggcggcygagccacttttccatcctctcacccagcttcttccgtgtcccccgcctccccaggtaccggtccgtagtggatctcatgaagtcctggtctgaggagaag

SEQ ID NO: 42824 - DNA, 201 bp, Homo sapiens
catgcctgtgaggcagggccactgccctcatgctcacagataggaaactgagatgggggaaaggaagcaaagtgatcacccaaggtcaccagcaagttggyggccgagccacttttccatcctctcacccagcttcttccgtgtcccccgcctccccaggtaccggtccgtagtggatctcatgaagtcctggtctgagga

SEQ ID NO: 42825 - DNA, 201 bp, Homo sapiens
agtcttctactttgtcacgtgggtttgttgcagggttccagggagatggggtagaaacggcaccaggtaaatgtgcatctctggacacagttgtgacgatrgtggcaattcccctggggaatttcattgcctttctttccccaggtctgggacaagcggctggccagggctgccgaagcctgggccacccagtgcatctgg

SEQ ID NO: 42826 - DNA, 201 bp, Homo sapiens
ggcaagtcttgtttggtttgagaacaaacaagtgcacagattgtggtggaaagtgaggagggattggaagactaagaaaataggataagggggccgggcayggtggcttacacctgtaatcccagcactttgggaggctgaggtgggcagatcacttcaggtcagtagttcaagaccagtctggacagcatggtgaaaccc

SEQ ID NO: 42827 - DNA, 201 bp, Homo sapiens
tgagcctcagtcttctactttgtcacgtgggtttgttgcagggttccagggagatggggtagaaacggcaccaggtaaatgtgcatctctggacacagttstgacgatggtggcaattcccctggggaatttcattgcctttctttccccaggtctgggacaagcggctggccagggctgccgaagcctgggccacccagt

SEQ ID NO: 42828 - DNA, 201 bp, Homo sapiens
gtcaaatatgtgtaatagaaaaagccctcagaggccgggtgcggtggctcatgcttgtaatcccagcactttgggaggcagaagcgagcggatcacctaasgtcaggagttcgagaccagcctggccaacatagtgaaacctcatctgtactaaaaatacaaaaattagccaggcgtatgcaggtgcatacctgcagtccc

SEQ ID NO: 42829 - DNA, 201 bp, Homo sapiens
acgttccagattctcatagaaaaacaagaacaggccaggagcagtgtcttacacctgcaatcccagcactttggggggctgaggcgagtgaatcacctgargttaggagtttgagaccagcctggccaacatggcaaaacctcgtgtctaccaaaaataccaaaattagctgggcatggtggcgcgtgcctgtaatcccag

SEQ ID NO: 42830 - DNA, 201 bp, Homo sapiens
gaggctgaggtgggagaatcacttgagtcctggagttggagaacagcctggaaagcctggcgataccccatctctatttagaaacaaacaaacaaacaaayaaaaaacctggcacctcggttttgtaactctcaggctttgtcaaacccaaatgactttgtccatccaatgaaaggaattccactgggtgcggcggctcac

SEQ ID NO: 42831 - DNA, 201 bp, Homo sapiens; identical to SEQ ID NO: 33748

SEQ ID NO: 42832 - DNA, 201 bp, Homo sapiens
gctcctcctgtccccccagttatcaaggcagctgcaatagcaacatgtgcttcaaggggctgaaatccaacaagttcacgtggttctgaattttctctggrctttggtgcgcctccagctgggcctgaccctccatgtcctgccctcaaaaaactgggtggagaaataattgtttctttaaaggatatgagttagaatcac

SEQ ID NO: 42833 - DNA, 201 bp, Homo sapiens
tgcactctagcctgggcgacaatgcgagactctatctcaaagtaaaataaaataaaataaataaaataaaataaaataaaataaaataaaataaaataaaaatagcctctgtggtgccttgcccatagtacatgctaaataaatggtggccatgactagaaccaagttataaactcttgggcatgggaaatcgaccgtttt

SEQ ID NO: 42834 - DNA, 201 bp, Homo sapiens
ctgcactctagcctgggcgacaatgcgagactctatctcaaagtaaaataaaataaaataaataaaataaaataaaataaaataaaataaaataaaataaaaatagcctctgtggtgccttgcccatagtacatgctaaataaatggtggccatgactagaaccaagttataaactcttgggcatgggaaatcgaccgttt

SEQ ID NO: 42835 - DNA, 201 bp, Homo sapiens
actgcactctagcctgggcgacaatgcgagactctatctcaaagtaaaataaaataaaataaataaaataaaataaaataaaataaaataaaataaaataaaaatagcctctgtggtgccttgcccatagtacatgctaaataaatggtggccatgactagaaccaagttataaactcttgggcatgggaaatcgaccgtt

SEQ ID NO: 42836 - DNA, 201 bp, Homo sapiens
cggctggccagggctgccgaagcctgggccacccagtgcatctgggcacatgggccttcacagctgatgagatacgtgggccagaacctctccatccattmtggccagtgagtgaccctctgcccttccttcactcagtcattcaacaaatactcattgaacacttactctgtaccaggtgctgcacttgacactgggata

SEQ ID NO: 42837 - DNA, 201 bp, Homo sapiens
cactgcactctagcctgggcgacaatgcgagactctatctcaaagtaaaataaaataaaataaataaaataaaataaaataaaataaaataaaataaaataaaaatagcctctgtggtgccttgcccatagtacatgctaaataaatggtggccatgactagaaccaagttataaactcttgggcatgggaaatcgaccgt

SEQ ID NO: 42838 - DNA, 201 bp, Homo sapiens
tcagtctcccaaagtgctgggactacaggcacgagccaccaagcccagcccctttaaggtaaatgctacctgctcacagaatttaaggattaaaatataaygtgaggccaggtgtggtggctcacgcctgtaatcccagcactctgagaggccgaggcaagtggatcacctgaggtcaggaggtcgagaccagcctggcca

SEQ ID NO: 42839 - DNA, 201 bp, Homo sapiens
agcccctttaaggtaaatgctacctgctcacagaatttaaggattaaaatataatgtgaggccaggtgtggtggctcacgcctgtaatcccagcactctgrgaggccgaggcaagtggatcacctgaggtcaggaggtcgagaccagcctggccaacatagtgaaatcccatctctactaaaagcacaaaaattagtcggg

SEQ ID NO: 42840 - DNA, 201 bp, Homo sapiens
acaaccccagggagcctgggtcccactgagcccttctcatagccccctctgtctctgtccttcaccagatggtgtgggcatcctccaatcggctgggctgygccatccacacctgtagtagcatcagtgtctggggcaacacctggcatcgggcggcatacctggtctgcaactatgccattaagtaagtgcctgcaccaa

SEQ ID NO: 42841 - DNA, 201 bp, Homo sapiens
gtggatctcatgaagtcctggtctgaggagaagtggcattacttgtttccggccccaagggactgtaacccacactgcccctggcgctgcgatggccccayctgctcccattatacccaggtactcctccgtcagggctgagggcccctgggataacacatcctggcgccttagaagaaaaggaatgtgtggagcagaaat

SEQ ID NO: 42842 - DNA, 201 bp, Homo sapiens
ctactttgtcacgtgggtttgttgcagggttccagggagatggggtagaaacggcaccaggtaaatgtgcatctctggacacagttgtgacgatggtggcrattcccctggggaatttcattgcctttctttccccaggtctgggacaagcggctggccagggctgccgaagcctgggccacccagtgcatctgggcacat

SEQ ID NO: 42843 - DNA, 201 bp, Homo sapiens
gggaagggaccgagagacaccccaggaaggtcagggaaagcaggcaggccccaaataagctggtcggggcagctgaggcgatgaaagccggttgggatctygaggagagtcagcccgaggccaaggtgagcaacggggatcccgagcaggcggccctaggcggtttggagctcccggaccctcgcccaaccgccgtcgggg

SEQ ID NO: 42844 - DNA, 201 bp, Homo sapiens; identical to SEQ ID NO: 33893

SEQ ID NO: 42845 - DNA, 201 bp, Homo sapiens
cgcagtggcctatacctgtaatcccagcactttgggagtttgaggagggaggattgcttgagcccaggagttcaagaccagcctgggctcaagcaatgtgrgaccacattgctacaaacaatttaaaaacaagaattaagaaatctgtcagttttcatatgttggctcccatttctcaaataccaggccatacgaaaaaat

SEQ ID NO: 42846 - DNA, 201 bp, Homo sapiens
agtcctgctcagtgacacttaatcctttaatcttttttttttttctaccctggccctcagtcttatttcactctccagcttcctccagtcctggccacatctccttttctcgcagatctctcatacttttgcccccaccatacctgctaaacttagttttttagtcttccagatctccaagggactttgaaggacaaaggc

SEQ ID NO: 42847 - DNA, 201 bp, Homo sapiens
ttgctatgtcttaggtttctaattctgctgcagtatctaatctactgataatccaatccagtgtactttcacctcacacattgtattttttacctctagargttaacttttgttctattttgtatcttccatgtgtctagttaacattcagactttcctctagcttcttaaatttcagaatatagttacaataactatttt

SEQ ID NO: 42848 - DNA, 201 bp, Homo sapiens
ctttatatgggacatgtatactacaatgtcctacctggcctgcttcccatatttacagtatctgtctggctactatagatattttagtttgtttcccgtgwtgcagactcagctgaaataacaatgatctgtgaagaattccagttaatcttttttctttcttttacaaataaaaggcaaagagagcccaggcatagtggc

SEQ ID NO: 42849 - DNA, 201 bp, Homo sapiens
tgtttcccgtgatgcagactcagctgaaataacaatgatctgtgaagaattccagttaatcttttttctttcttttacaaataaaaggcaaagagagcccmggcatagtggctcacagttataatcccagcactttgggaggccaaggtgtgaggatcacttgagtcccagagtctgagaccagcctgggcaacatagcga

SEQ ID NO: 42850 - DNA, 201 bp, Homo sapiens
atgagaaactgagtaacttgcccgagttccagctagtaagtggtagggctgaaatttaagcccaggtgaacctgaagctgaagctctcaacctttttgccrtgtgataccatctattctgatggcaatggcatgctttccaatgaaataatagatttggaagaactttgaaaatacaaagggacttttcttgtctaagttg

SEQ ID NO: 42851 - DNA, 201 bp, Homo sapiens
tgccacctgggttcaagcgatttttgtgcctctcagcctcctgagtagctgggactacaggcgtgcaccaccataccagctaatttttgtatttttagtarcgacagagtttcaccatgtttggccaggctggtattgaacgcttggcctcaagtgatccacctgcctcagcctcttaaaatgctgaaagtacaggcgtga

SEQ ID NO: 42852 - DNA, 201 bp, Homo sapiens
gtcttgaactcctggacttaagcgatctgtccaccttggcctctgcaagttctgggattacaggcatgagccactgcttttttttgtttttttttcgtttktttttttttaaagagagacagggtctccaactcctgggatcaggagattcacctgcctcagcctcccatagtgctggggattacatgtgtgagccactgc

SEQ ID NO: 42853 - DNA, 201 bp, Homo sapiens
ctttgctttctgataagacctcatctgaaaatctgcaagtcatcatttggcagtcaagtgatgttagagcttaatctgccttgacccccaaaacacaaacraatatttttcataacagaaatttgaagctgaaaatgttagtctacttttccaaagattagcatgtaatctcagaatgtacacacagtgactaggcaagaa

SEQ ID NO: 42854 - DNA, 201 bp, Homo sapiens
taatctctcatacttaacagatgaaaagtaggggctagagttggtaagtcacttgcccaaggtcacaaagagacttaatggcagaagccagactagacccytcatcagcaatgtggctcccctagcttggggtcttggaagacccatgtggaggaaaggacagtagctgtcctcccctgaggaagtccttagccaacttgg

SEQ ID NO: 42855 - DNA, 201 bp, Homo sapiens
gggcaaatccaatgttccaaaacccaggtatgagatgaatttaaatggtgggtattgaccagcggtttcttttttttttttttttttttacctctcccaaggctccatcattcaaaccagaggtttcaaactggcttatcgacagtatttttttgctatgcagcatgtcctgaattttttatgatggctgccaagtgttaa

SEQ ID NO: 42856 - DNA, 201 bp, Homo sapiens
gaaagctctacaacagcttgtgcccgggcactctctgcctcatcctgctgccaggaaccaagaggtaaggactagaaagggtatcccttcaggactctgtmccctggatttcagctgttcttagagaaaaagccttttgctgatatttaggcacatagtgaggacttacatgaatcatctctttaattttcaccgttctaa

SEQ ID NO: 42857 - DNA, 201 bp, Homo sapiens
catgttgcccaggttggtcttgaactcctgacctcaagtcatccacctgcctcggcctcccaaagtgctgggattacaggcgtgagtcaccgtgcccagcsaaaactgaatttcttaaagccagccatttgattccctggtttaggaaggaccgcagagtaggttggtatcttagggatgactttgtaaagtgagcttagt

SEQ ID NO: 42858 - DNA, 201 bp, Homo sapiens
tacaactgccaaacagctagagctttgctttctgataagacctcatctgaaaatctgcaagtcatcatttggcagtcaagtgatgttagagcttaatctgccttgacccccaaaacacaaacaaatatttttcataacagaaatttgaagctgaaaatgttagtctacttttccaaagattagcatgtaatctcagaatgt

SEQ ID NO: 42859 - DNA, 201 bp, Homo sapiens
gggaggctgaggcacgagaatcacttgaacccagggggcagaggttgcagtgagctgagattgcaccactgcactccagcctgggctacagagtaagactyttatctcaaaaaaaaaaaaaaaaaaagattcttacattctaggagttgacagagcatgaatacctctggccttgaaggtggatcagaagaaattcatttc

SEQ ID NO: 42860 - DNA, 201 bp, Homo sapiens
gttcatacatcaggtggagacagattctgtgtttgtctttgctcatttctacctgctttgcctcagagagctcctcaacgctgacccagttccatgaataytcattacaaggtggcagggaactaacaagtattgaaggctcctaaattccaagcaccacaccaggttttttacaacaaacattgttaaataagttaatgt

SEQ ID NO: 42861 - DNA, 201 bp, Homo sapiens
tcgtgagtcggcctgccatgtttccatgtgccatttcttaccccttgtaggcaatggcaaagaatgtggtcaggctgtagcctccccaaccagcagacagytttatggaaacttggtatagcagctaaaagagtttagtttgtttatatggcatgtataagttttcaataaatgcctaaagttcaagcatagtatggggat

SEQ ID NO: 42862 - DNA, 201 bp, Homo sapiens
atacctttgtttcttatttattgcagcactcatggttcactctctggtctaggactgatgggaataaaagaggaagaagaaagcgctggcccaggcctgtkttcgtgagtcggcctgccatgtttccatgtgccatttcttaccccttgtaggcaatggcaaagaatgtggtcaggctgtagcctccccaaccagcagaca

SEQ ID NO: 42863 - DNA, 201 bp, Homo sapiens
ggcaaaataatattccatttcatgtatataccacattttgtttatccatttgttgatggacatttgggttgtttcttgtttctaccctttgttttgtttgttttttttttttttgagatagggtcttgctcacccaggctggagttcagtggcgtgatcacaactaactacagcctcaacctcctgggctcgagcaatcct

SEQ ID NO: 42864 - DNA, 201 bp, Homo sapiens
aagatagcagcctggcgctggagccggaagattggaaagctctacaacagcttgtgcccgggcactctctgcctcatcctgctgccaggaaccaagaggtraggactagaaagggtatcccttcaggactctgtcccctggatttcagctgttcttagagaaaaagccttttgctgatatttaggcacatagtgaggactt

SEQ ID NO: 42865 - DNA, 201 bp, Homo sapiens
atatcttatttcccttgtttttaatggctacatagtattctgctatatgatatacctattaacatttgtgctttatacatttttgctattacaaataatayttcagtgaacatccttggacatttggcaagtatttatatcaaaaaaatctttggtgaataatcccatgcattgactcatgatttcagttctctttccata

SEQ ID NO: 42866 - DNA, 201 bp, Homo sapiens
gaggaaccattatactgttttccacagtggctataccattttacattcctaccagcaaagaacaaaggttccaacttatctacatcttcactgacacttgktttctattttatttaatagtagccatcctaatggatgtgaaatggtatctcatttgggtttgatttgcgtttccctaatgattagtgatgttgagtgtcg

SEQ ID NO: 42867 - DNA, 201 bp, Homo sapiens
gcactgcttcctcctgatgctgtgttagtgggccactccttagatttggatctcagagcactgaaagtgagtatctgatttaggactttgcattttcagtrtaaatgcctgttccatttatctcaaatctaaagtcttgggctcttctctcccaccctgctagcccacttgttttttcctttagcataagacactactcat

SEQ ID NO: 42868 - DNA, 201 bp, Homo sapiens
atctttatttgaattctgtgcaataatggctgtcttccagttccaggcagacggtgaatggtgataaattctattaactctcactcactgcttttcctgcrccttctcccctatttcccctctatatgactgtaactgacttaaggccatctgtcttaactgtgttggtttgatttcttggcagctggtgccagctttttc

SEQ ID NO: 42869 - DNA, 201 bp, Homo sapiens
atactactcacagtgaagaataggcaggaggtttagatactagccagctgaaagattcatgatagcagtgtgtttttcaaactgtgggttgtgtcctattrgtaagttataagtaatctttttggttttgcaggaaggtgagtgatagagtagtataggacttatcagagttagttgcatatagtaaggttaggtattgtt

SEQ ID NO: 42870 - DNA, 201 bp, Homo sapiens
ttggatggtattctggtagatggtatctgcatcaaggtagggtgacaagagaaagccccctttgcttgggtctggcctaccacagcctgtatttatagtgycccaggacatataggaaacactctcaagaggcccacgcacaagactttgttatggaaagtcttcagccaagtctaacattctcctactggcagtgattga

SEQ ID NO: 42871 - DNA, 201 bp, Homo sapiens
cttttcacatgcttattagtcatttgtatagcttcagagaactgtctattcagatcctttgtccatttttaaattgggctgtattttatcatggaattatyggagttcttattttctggatgcataaattttatttttttaattttttaagttgatgtaggcgtgttttataggtgccaggcaccgtactaagtgcctttt

SEQ ID NO: 42872 - DNA, 201 bp, Homo sapiens
tggccgatagaacgttaccccctgagctccacctaggcattagattctcataggaatgtgccaaacctattgtgagccctattgtgaactttgcatacgarggtcctaggtggcatgctgcttatgagactctaatgataaatgtaatgcacttgaatcaccccgaaaccatccccccagcccttctcccagtcagtggaa

SEQ ID NO: 42873 - DNA, 201 bp, Homo sapiens
ccactgcactccagcctggcgacagagtgagactcgatctcaaaaaaaaaaaatcacgttttccaactagttactatgtttaatcaggtctttgcatgttrctagaagttgattccttgtgtttgaagaagtattttgttgttgctgccatgaggactttgccttaattgttggtttggcttagttttacaccttgaagat

SEQ ID NO: 42874 - DNA, 201 bp, Homo sapiens
gtcctgctcagtgacacttaatcctttaatcttttttttttttctaccctggccctcagtcttatttcactctccagcttcctccagtcctggccacatctccttttctcgcagatctctcatacttttgcccccaccatacctgctaaacttagttttttagtcttccagatctccaagggactttgaaggacaaaggca

SEQ ID NO: 42875 - DNA, 201 bp, Homo sapiens
acaatctcaaacttttagaaaagttgtaagaatagtatcaaaacctcccctcaaccaacatttgaaagtagttgctgacacaatggtctttttctacccaycctcaagatattttattatatattctctataaacctacataatcacaatgcaaccatcaaaattggaaattaccatggatatatcatgaccatctactcc

SEQ ID NO: 42876 - DNA, 201 bp, Homo sapiens
agtttgagctggaaagcaatgatgaggaaatcttggtctttctgcagcctcatctctgtatacagtatgaagtcctagaagctgcccagctggccatagartccttggatggtattctggtagatggtatctgcatcaaggtagggtgacaagagaaagccccctttgcttgggtctggcctaccacagcctgtatttata

SEQ ID NO: 42877 - DNA, 201 bp, Homo sapiens
tgatcttcaatcttcttgtgaccttaagtcagcagaatattatcttccttgttccagaatctcccaattataatcattatctacaactgccaaacagctaragctttgctttctgataagacctcatctgaaaatctgcaagtcatcatttggcagtcaagtgatgttagagcttaatctgccttgacccccaaaacacaa

SEQ ID NO: 42878 - DNA, 201 bp, Homo sapiens
tcctgctcagtgacacttaatcctttaatcttttttttttttctaccctggccctcagtcttatttcactctccagcttcctccagtcctggccacatctccttttctcgcagatctctcatacttttgcccccaccatacctgctaaacttagttttttagtcttccagatctccaagggactttgaaggacaaaggcag

SEQ ID NO: 42879 - DNA, 201 bp, Homo sapiens
tctccaatttatctgtaaaatggggatgatagtagtacacacttacaaagttgtgagaattaaatgatttaatgcatgtaaaatgatcagaactgtgtttygctaatgtaagagtttaacattagcttaaggccatgggaatacattagcaataatatctaatgtttattaagtacttatgtcaggtactagcctcagtac

SEQ ID NO: 42880 - DNA, 201 bp, Homo sapiens
gtacagcactagctgataatagaatgggcttcataaaaattacctattagtggtatttagcataatactggatatagtacacactccataaatggtagatrcaattattaatattatttgcattcatcttctttgtgcagactacactgtgttgatcctcttaagtgtaacattcagcagcctgcccagctttaatttcac

SEQ ID NO: 42881 - DNA, 201 bp, Homo sapiens
ggctgagtctgttttcccattctgagactaatacatgtgtcagggaccatgctccttggcaacctaactgaacaaacagtaggggatatagaaagcaaaargaccttagaggcctcatgtagatttgtctctgattttctttggaaatctaggcaaactcttattcccaggttataatctgtagctcctaggttgatattg

SEQ ID NO: 42882 - DNA, 201 bp, Homo sapiens
ataatatgggaatacacacttttctgggatattgttgagagtaaatgagatattgtgtataaaattcttagcacagtgtcttgaatatactaagcactatmctggtggtgtggtgattattgtagttaatactaataattataaaaaatctgcatagatttttgttttcttggagtagggggagcatacaattgtttcaac

SEQ ID NO: 42883 - DNA, 201 bp, Homo sapiens
atgcatttccccaggctgtggaagcttgctgtgtgactgacttctctgggccttgtttgtgcagttgtgtccgtgatggcagcagatactcttgggaaacgttggggaaaaaaggaatagcaaaaacaatagaaggtttccttaggctggggtcttgatgcagctcttaatccttacatttttggtagcttcttaaattaa

SEQ ID NO: 42884 - DNA, 201 bp, Homo sapiens
agctgaggtctagtagaaaatgatttcttgagtctaatgcactaatgaacgaatacattcatttttagtattctgttttaatagctgaaagtaggtccttytactcacactttagaaaacttagatctgtattccaggataaagaataaatatcacataagtggctgggtgccgtggctcacacctgtaatcccagcactt

SEQ ID NO: 42885 - DNA, 201 bp, Homo sapiens
gggtcttgctctattgcccaggctggagtgcagtggcgtgagcagagctcactgcagccttgacctccgggctcaagcgatcctcctgcctcagccacccragtagctgggactacaggcatgtgccaccatgcctggctaatttttaaattttttatacagatgaggtctcattatgttgcccaggctcgtctcaaaact

SEQ ID NO: 42886 - DNA, 201 bp, Homo sapiens
tgcatttccccaggctgtggaagcttgctgtgtgactgacttctctgggccttgtttgtgcagttgtgtccgtgatggcagcagatactcttgggaaacgttggggaaaaaaggaatagcaaaaacaatagaaggtttccttaggctggggtcttgatgcagctcttaatccttacatttttggtagcttcttaaattaat

SEQ ID NO: 42887 - DNA, 201 bp, Homo sapiens
ctgggaccacaggcatgcacgcctggctaattttttgtaagacagggtctctctatgttgcccaggctgatcttgaactcctggactcaagagatccaccyaccttggcctcccaaagttcttggattacaggcgtgagccactgtgcctgaccctgggttgtttctacctttgactatcatgaataatgctgctatgaac

SEQ ID NO: 42888 - DNA, 201 bp, Homo sapiens
tgaattgctgaagtatgcagttctgggcaaatccaatgttccaaaacccaggtatgagatgaatttaaatggtgggtattgaccagcggtttctttttttyttttttttttttacctctcccaaggctccatcattcaaaccagaggtttcaaactggcttatcgacagtatttttttgctatgcagcatgtcctgaattt

SEQ ID NO: 42889 - DNA, 201 bp, Homo sapiens
ttggcttttttattgttgaattgtaggatttctctgtacattctggatattaatcttttattagctatgtgattgcaactatttctccattctgtgggttrctttttgacactgctgttagtgtcctttgatatacaaaaggttttaatttttatgaagtctaatttgtctatttttaattttgttgcctgcctttgatgt

SEQ ID NO: 42890 - DNA, 201 bp, Homo sapiens
gtgaattgctgaagtatgcagttctgggcaaatccaatgttccaaaacccaggtatgagatgaatttaaatggtgggtattgaccagcggtttcttttttytttttttttttttacctctcccaaggctccatcattcaaaccagaggtttcaaactggcttatcgacagtatttttttgctatgcagcatgtcctgaatt

SEQ ID NO: 42891 - DNA, 201 bp, Homo sapiens
caggaggttgaggctgcagtgaactatgatcgcaccactacactccagcctgggattacaggtgtgagccaccaggctcggccaagtgttcttttttatgygtcttttgcttgagcttgttgagcttttgcaatttgcgggtttatcatttttatcaaattagaaaaaatgttgaccattatttctccccattattttttc

SEQ ID NO: 42892 - DNA, 201 bp, Homo sapiens
cctatacaaaatatatgacagtaaccctttccctgccccaatatttcctatacttttctcctccttttcttcaaagcccttatcttacctgatatattacrtatttatttgtttattatccatatttccaactataagttaaatgtcatgaggaattttgttggttttgtgcattggggaattcctagtggccaaaacagt

SEQ ID NO: 42893 - DNA, 201 bp, Homo sapiens
ccctagtagaatggactctttgagagcatgaattatgctttatttatcctattcctagcatgtaaccaagtatctataattcagttttgtgtcaatgatarttactttattaataatgtcatacctaccacatattgttattttaggccatcattttcaattaattagcacttccttatgttagaatatacctgtatgtta

SEQ ID NO: 42894 - DNA, 201 bp, Homo sapiens
aagcagcaggccaagagcctaaaaacacagcagaagtacttcagcacccaaacacaaggtaatattttcagtttgaaacaagagcaaagacaaatggagtrtctagtttcttatttaacaacacctgagaatgtttttatcctcttttgagtctattaaaaactatttaccaaaaaatgataacatctatcacaaaaacca

SEQ ID NO: 42895 - DNA, 201 bp, Homo sapiens
gcatttccccaggctgtggaagcttgctgtgtgactgacttctctgggccttgtttgtgcagttgtgtccgtgatggcagcagatactcttgggaaacgtyggggaaaaaaggaatagcaaaaacaatagaaggtttccttaggctggggtcttgatgcagctcttaatccttacatttttggtagcttcttaaattaata

SEQ ID NO: 42896 - DNA, 201 bp, Homo sapiens
tatgtgagatagtgaacattaccgtggcttggcatttttgttggcttgtacctagcccaggtgaatagattatttacagtaagttttctggtatgttaaamgtagctcatccccactcttaccaactttgaggactctggaaggtttcaaggtgccagattgagagctaatcaactatttcagtttcttcatcatatagat

SEQ ID NO: 42897 - DNA, 201 bp, Homo sapiens
gggaggttgaggcaggaaaatggcgtgaacccgggaggtggagcttgcagcagtgagccgaggtcgcgccactgcactccagcctgggcgacagagcaagrctccatctcaaaaaaaaaaaaaaaaggccatctatgtgagatagtgaacattaccgtggcttggcatttttgttggcttgtacctagcccaggtgaatag

SEQ ID NO: 42898 - DNA, 201 bp, Homo sapiens
ttggacaagcttgcactagagcatctgagcttttgagggctcaagggatgaatacatcacagatgcacttggttttgagggcttcctacatgtcagcctcrcctgtgcttctcattcctccccagatttttggattcctggtttgcatgggggtgatcctggccattggcaatgccatctgggagcacgaggtggggatgc

SEQ ID NO: 42899 - DNA, 201 bp, Homo sapiens
ccttcctgtgccccgactgtctgctgcctgcccgccacatgccagcttgtgaaggctggggctagcctctggtgagcttgtttccgccctggctttaaagrgtgtgcggaaacccagcctggtgggcgaggttgtctatcacataagggctccagtcgccccctggtggccattgggcaccaatctcctattttgtttcaa

SEQ ID NO: 42900 - DNA, 201 bp, Homo sapiens
gctacctgctgtgggaggcagagatggggtggctggaaaggcctcgtgtgaacactggggggctctgtggggccatgtggctgttcagtgtgttggtgctyatctgttcttcctggggacagacaccctgtgcagctggccacagaggcctctgcgtcagcctggtcccaggtgctgtgggtcggaggcctctgtgtcagc

SEQ ID NO: 42901 - DNA, 201 bp, Homo sapiens
ctagaaatctgaactccttgttgggctctcctccccttcctgtgccccgactgtctgctgcctgcccgccacatgccagcttgtgaaggctggggctagcytctggtgagcttgtttccgccctggctttaaagggtgtgcggaaacccagcctggtgggcgaggttgtctatcacataagggctccagtcgccccctggt

SEQ ID NO: 42902 - DNA, 201 bp, Homo sapiens
tctgtctcaaaaaaaaaaaaaaaaaatggaaccaatagattgaatgtggggtccaaagaagagagagaaatgaatcaagataaaaaacaacaaaaaaacagaaattaaaaaaaaatttttacagaaatgaatcaagatccattgcagggtttttagttggagcaactgaatgggttgtggcatttcctgagttgagaaaga

SEQ ID NO: 42903 - DNA, 201 bp, Homo sapiens
ccagcgagaccaacatgaaagtacgtcaggcgattccagtcacctcagaattgggagacatcagtaagcttgccaagtttgacggtgagtaattttggagsagcagcctgaaggtagaggagtggggttgggttttgtttgggggcgttaaattatacattttcctttgggctttttgttgttattatgcaactccctgga

SEQ ID NO: 42904 - DNA, 201 bp, Homo sapiens
ctctgtctcaaaaaaaaaaaaaaaaaatggaaccaatagattgaatgtggggtccaaagaagagagagaaatgaatcaagataaaaaacaacaaaaaaacagaaattaaaaaaaaatttttacagaaatgaatcaagatccattgcagggtttttagttggagcaactgaatgggttgtggcatttcctgagttgagaaag

SEQ ID NO: 42905 - DNA, 201 bp, Homo sapiens
ctcctgacctcaggtgatccactcacctcggcctcccaaagtgctgggattacaggtgtgagccaccgtgcccagctagcacagagaaatctgaataaagrgaaagggagcctgccatgtggctctctgggaactgtcaatccaggaagaggaaacagcaatataaaggccttcagccctggcctgggaggaggtcttctg

SEQ ID NO: 42906 - DNA, 201 bp, Homo sapiens
ccgtgagattccagagatgttttgaaaatggaaacaacaggccgggcgcggtggctcaagcctataatcccagtactttgggaggccgaggtaggcggatyacctgaggttgggagttcaagaccagcctgacccacatggagaaaccccatctctactaaaaatacaaaattagccggacttggtggcacatgcctgtaa

SEQ ID NO: 42907 - DNA, 201 bp, Homo sapiens
agtttttgaagaaagtcaaaagaatgtattctgtattctaaaaatgcattctaagtgttacagctcttttagaatttgtctagcaggttttccagttttcmctggaacccctcccccacaaaaagaaaaaaatgcattctaaaaaaaaactaaagaatgctttaggaagtattgactggcagtagtgtacagcatgaatag

SEQ ID NO: 42908 - DNA, 201 bp, Homo sapiens
ggaaccagtgctgtagaattcgacctagagtcttctatgtgaagcttggggatacagagatgtataaggtggcctctgcctttagcagcagcagatggatmggtcgaggaggggagatctggacagtgtcagactgagataccatgtgggaggcacagggtgcccggggactgggagagtgtcgctccctaagcaggtagg

SEQ ID NO: 42909 - DNA, 201 bp, Homo sapiens
gagaatcgcttgaaaccggaaggtggaggtagcagtgagccaagatcacgccactgcactctagcctgggcaacgagcgaaactgtgtctcaaaaaacaaygaaacaaacaaacaaacaaaaaagtttttgaagaaagtcaaaagaatgtattctgtattctaaaaatgcattctaagtgttacagctcttttagaatttg

SEQ ID NO: 42910 - DNA, 201 bp, Homo sapiens
aggtcatccgtctgggccacagctacttcatcaactgggataagaagatgttctgcatgaagaagcggacgcctgcagaagcccgcaccaccaccctaaaygaggagctgggccaggtggagtacatcttctccgacaagacgggcaccctcacccagaacatcatggttttcaacaagtgctccatcaatggccacagct

SEQ ID NO: 42911 - DNA, 201 bp, Homo sapiens
agttggccagggtcttgggccaagagcaagagctggaaacatagcttgctcctgattgtggaggcttttgaatatttgcctgtggactttgtatttactaaccattaaaagttattgaaaagactgggcacggtggctcacacctgtaatcccagcactttgggaagccaaggtgggcggataacgaggtcaggaattcga

SEQ ID NO: 42912 - DNA, 201 bp, Homo sapiens
tgtactgtaaacatttgatgttatctgtttatctttgtgggcagagcaaactttttaccacagtttcctggtacttgggactgtattagagaaaaaaaaaatattgatttattcagcacctatttattacatgcctactgtgtacaaagaagtgtgctaggtgccatcacaaataaaagatgaattaggaatggatctcct

SEQ ID NO: 42913 - DNA, 201 bp, Homo sapiens
gaggctgggggaggggcagggtcagagctggagaagagggtcttcaaaagaggtctcatgaggggagggaagggttatcctcagcttcctgacctcattcrtctgtcacttcttgcagggtctcccatgggattgctgggatcttgctgggtgagatggcagtgtgtgcaaaaaagcgccccccaggtaagacaggcaagg

SEQ ID NO: 42914 - DNA, 201 bp, Homo sapiens
ccgattcctcaggctcaacctgaagccggatctctccgacacggtgagaagccaggctacctgctgtgggaggcagagatggggtggctggaaaggcctcrtgtgaacactggggggctctgtggggccatgtggctgttcagtgtgttggtgcttatctgttcttcctggggacagacaccctgtgcagctggccacaga

SEQ ID NO: 42915 - DNA, 201 bp, Homo sapiens
gtgcccagctagcacagagaaatctgaataaagggaaagggagcctgccatgtggctctctgggaactgtcaatccaggaagaggaaacagcaatataaakgccttcagccctggcctgggaggaggtcttctgcacgtggagctggggaggagtggaggaaatgagttggagggtgggggtgtggaatgagtcaggatta

SEQ ID NO: 42916 - DNA, 201 bp, Homo sapiens
gaatgggtgaagtgtgccgggtgactcttgatgtgtttatgttgggggtctttgcctgtctgaatttttctggcactttcttcacctgccccattcatagkgcggaatccagaggggaagatccgactctactgcaaaggggctgacactatcctactggacagactgcaccactccactcaagagctgctcaacaccacc

SEQ ID NO: 42917 - DNA, 201 bp, Homo sapiens
tctctggcttcctctccttctggtcctacatcatcatcctcaacaccgttgtgcccatttcactctatgtcaggtatgtgccttctctgacctggggtctstccagggagtcaggcggtcccatagaacttttcttttctatgaagatgaagtccttgagaagtaacgagaagtcctcttcttcctgtactgtaaacattt

SEQ ID NO: 42918 - DNA, 201 bp, Homo sapiens
gcctcgtgactcccaaggccactgactcctcttcatccccagggaatgcccagaacaccttggcccagcccacggtgtggctgaccattgtgctcaccacrgtcgtctgcatcatgcccgtggttgccttccgattcctcaggctcaacctgaagccggatctctccgacacggtgagaagccaggctacctgctgtggga

SEQ ID NO: 42919 - DNA, 201 bp, Homo sapiens
cccaggtttctgtgcccaggtgtcttctccgttcttgtctctccccaggcggagggcctgcagcgaaggcccatgtgggtggggcacctcctcttcttccygacccaagcctcacctcttgtcccctgtgcagtgtggaggtcatccgtctgggccacagctacttcatcaactgggataagaagatgttctgcatgaaga

SEQ ID NO: 42920 - DNA, 201 bp, Homo sapiens
gatgccactgatgactatgtgagtggttttcattcttctattttgtcccagtcacccacccctactcccagccccacccccatctcatggccaccttcatycagcacaatttcttggtgaccttgacatcccttacccggtccagctagatccatgatgtctttttgctgagcgtggggagagggaatcagggagtgaact

SEQ ID NO: 42921 - DNA, 201 bp, Homo sapiens; identical to SEQ ID NO: 33951

SEQ ID NO: 42922 - DNA, 201 bp, Homo sapiens
gctcaacctgaagccggatctctccgacacggtgagaagccaggctacctgctgtgggaggcagagatggggtggctggaaaggcctcgtgtgaacactgkggggctctgtggggccatgtggctgttcagtgtgttggtgcttatctgttcttcctggggacagacaccctgtgcagctggccacagaggcctctgcgtc

SEQ ID NO: 42923 - DNA, 201 bp, Homo sapiens
gtggcggtgccgacaagcccctcaagggctgaaggccgaggatggatgccctgtgccagtgaccagagcacccagggctggccagtcactgagggaacagygtctcggaactgctggtcctcattccttgcttcccgtccccccggtagactctgtcctgctggtcccaccacacatggctgggacatctgttcccagctg

SEQ ID NO: 42924 - DNA, 201 bp, Homo sapiens
cccccggtagactctgtcctgctggtcccaccacacatggctgggacatctgttcccagctgtaggcccttccaccagctggggagctagagggagcaggyccaagggcagagcagaggctgaggcacggggagccagccccactcggggaccagaagtggaaccaaaaacaagaaaaaactgtgagagattgtgtctgcc

SEQ ID NO: 42925 - DNA, 201 bp, Homo sapiens
gtaaacaagaagcccaggggaggcggtgctgtgcgttgtgcccagggctcaggtgggggtttctggaccatttagacttgaatccctgctccccactgccrttctggaagaccacaaccgtatcatttccacctcgacaggaaagcccgggagaagatgatggactcatcccgctccgtaggcaacggcttcacctatcag

SEQ ID NO: 42926 - DNA, 201 bp, Homo sapiens
ctctcctcctctttccccctcccacacctgtgtttgctagcttttggggtagaggtctggggaagtataaagatgggggaggcagcctcagtctggttctsggttgggactggagactgctcattatcttctctcctactgccatagagtaactgcatcaagacctccaagtacaatattctcaccttcctgcctgtcaac

SEQ ID NO: 42927 - DNA, 201 bp, Homo sapiens
atccaggaactcccctcttctctggaaggagtgagccttctgtccctggggctgccctgggcaccacagttctgtttctgggggaaggggcttttagggcrtgcgcctgcctgactatgcctactttctgcagattgggctcgacacaggctactggacggccatcaaccacttcttcatctggggaagccttgctgttta

SEQ ID NO: 42928 - DNA, 201 bp, Homo sapiens
aagctttcttcttccaagctaacttctgtcctggaggccgttgctggggagtacgccctggtcataaatggtcacagcctggtaggcatcgctatccttarcttgggcagtatctttccagtgagcacttctgtccagggcttttatatcttgttctaatttcccctgatttcagagaagactggtctcaaaggggactgg

SEQ ID NO: 42929 - DNA, 201 bp, Homo sapiens
cagcactttgggaagccaaggtgggcggataacgaggtcaggaattcgagaccagcctggccaacatgttgaaaccccgtctctactaaaaatacaaaaaytagccaggtgtggtggtggttgcctgtaatcccagctacttgggaggctaaggtaggagaatcgcttgaaaccggaaggtggaggtagcagtgagccaag

SEQ ID NO: 42930 - DNA, 201 bp, Homo sapiens
gtcctctcctgatgccctgaccctggtctcagctccaggaattaggggagctccttggctgtttgaagtgagacactggcctctgggcatcctggccaggyggaaccctgctagactctcccctgttgctgctcagggtccttgtgagtctgtggaatgtggctgtggttggacttcccagtgtggcccgtggctgtgctg

SEQ ID NO: 42931 - DNA, 201 bp, Homo sapiens
tgggcgtggtggcaggtgcctgttttcccagctactcggggggctgaggcaggagaattgcttgaatccaggaggtggaggttacagtgagccgagtttgygccattgtactccagcctgggcgacaagagtgaaagtctatcaaaaaaaaaaaaaaattagattctgagagtcctccccttgtcctctcctgatgccctg

SEQ ID NO: 42932 - DNA, 201 bp, Homo sapiens
gaaagggtccatcctggccaggcacggtggctcatgcctatagtcatagcactttgggaggctgaggtgggaggattgctcgagcccaggaatgcgagacmagcctgggcaacatagtgagaccacatccctacaaaaaatttaaaaattagccaggtatggtggcatgcacctgtggtctcagctggccagtgactcagg

SEQ ID NO: 42933 - DNA, 201 bp, Homo sapiens; identical to SEQ ID NO: 33947

SEQ ID NO: 42934 - DNA, 201 bp, Homo sapiens
agtggaactggggccccacagtttccttaacattggttttttcttccttcctagttgggtctgaggggcctagaagaaagggtccatcctggccaggcacrgtggctcatgcctatagtcatagcactttgggaggctgaggtgggaggattgctcgagcccaggaatgcgagaccagcctgggcaacatagtgagaccac

SEQ ID NO: 42935 - DNA, 201 bp, Homo sapiens
actcctgacctcaggtgatccatccgcctcaacctcccaaaatgctgggattacaggcttgagccactgcgcccagcccataatagttttttttttttttataattatttttcatttaacattcagctgttaccaaaatctcatagtgttttaagaaagtttatgaatctgtgttgggccacatgtggcccagagaccatg

SEQ ID NO: 42936 - DNA, 201 bp, Homo sapiens
ctggagggaagaatttgatgaccccctcagttgtggagctaactccttaaaatgatattctgtggaaaaaaacagggaaccccccagcaaagtgttggtcyagacctcagtttgctcctcctgactgcagcatcattttgttgcagaagaagaaaggagggcgcgggctaatgaccgagaatacaatgagaaattccagta

SEQ ID NO: 42937 - DNA, 201 bp, Homo sapiens
cggggcgttcctctgctggctgtgtgcagccggctccaccttcaggctctccttgccctttcccacccaggtttctgtgcccaggtgtcttctccgttctygtctctccccaggcggagggcctgcagcgaaggcccatgtgggtggggcacctcctcttcttcccgacccaagcctcacctcttgtcccctgtgcagtgt

SEQ ID NO: 42938 - DNA, 201 bp, Homo sapiens
agaggttctgtcttgtttatcactcagtcccccagggcctagctattttctggtacatactcttaaaaaatgcttattaaaggaggagagaaggagcctcrgaaaatttcttagggttctctgtatgtgacatcagctgtcttcctgtgcctgatgtgtagcaaagaaaggttgcatgctcccttgctccctgttctcttc

SEQ ID NO: 42939 - DNA, 201 bp, Homo sapiens
aacgaattccttcgaggcgggggaaggtgtcttacctttcagttttcttcttttcagttccgccacaagagcgataaccaggtgaataaccgccagtctcrggtgctgatcaatggaatgtgagtgcctgttggagacaagagctctggggacgaagggggtcccttaggaacctctttagctcctgacagcctcttcact

SEQ ID NO: 42940 - DNA, 201 bp, Homo sapiens
aactcctgacctcaggtgatccatccgcctcaacctcccaaaatgctgggattacaggcttgagccactgcgcccagcccataatagttttttttttttttataattatttttcatttaacattcagctgttaccaaaatctcatagtgttttaagaaagtttatgaatctgtgttgggccacatgtggcccagagaccat

SEQ ID NO: 42941 - DNA, 201 bp, Homo sapiens
aagggacaactggtatgggtctgagggagggtagcttacagcagcccctacccagcttgggggcagcctaggaaaccgaattcttccgcttgatcccaaarctgggttatctgccaggacagcgcagagcaccagccccacgccccgaaacacctgcagtcttatcttcgggcacctgcagctcctgctttctggcctagg

SEQ ID NO: 42942 - DNA, 201 bp, Homo sapiens
cgctccctaagcaggtaggcagagagggagagatggcatttgctctgggctttgagtggtgactgggctggatgaaggtggagccacaatggagaggaggmtgagagggctggaagcaaaggtgtggagatgggagcctgggaatggcctatggaaatagttggccagggtcttgggccaagagcaagagctggaaacata

SEQ ID NO: 42943 - DNA, 201 bp, Homo sapiens
aattctcatgccttggactcctgagtagctgagactacaggcaagtgccatcaggactggctaattttttaaatgtttttagtagagacggggtttcaccrtgttggccaggctggtctcaaactcctgacctcaggtgatccatccgcctcaacctcccaaaatgctgggattacaggcttgagccactgcgcccagccc

SEQ ID NO: 42944 - DNA, 201 bp, Homo sapiens
gtgcccgccaccacacccggctaatttttttgtatttttagtagagatgagagatggggtttcaccatgttggccagactggtctcgaactcctgacctcrtgatctgcccgccttggcctcccaaagtgctgggattataggtgtgagtcactgcacctggccttttttttttttttttgagacaggttcttgctctgtt

SEQ ID NO: 42945 - DNA, 201 bp, Homo sapiens
tgcaatggcattatctcggctcactgcaacctctgcctctcgggttcacgtgattctcctgcctcagcctccctagtagctgggattacaggtgcccgccrccacacccggctaatttttttgtatttttagtagagatgagagatggggtttcaccatgttggccagactggtctcgaactcctgacctcatgatctgcc

SEQ ID NO: 42946 - DNA, 201 bp, Homo sapiens
cctgggccacattggaagaagaattgtcttgggccacacataaaatacactaacattaacaatagctgataagcttagaaaaaaaaaaattgcaaaaaaaatctcataaatttttttttttttttttgagacggagtctcactctgtcactaggctggagtgtagtgcaatggcattatctcggctcactgcaacctctgc

SEQ ID NO: 42947 - DNA, 201 bp, Homo sapiens
gttggcttgtacctagcccaggtgaatagattatttacagtaagttttctggtatgttaaaagtagctcatccccactcttaccaactttgaggactctgraaggtttcaaggtgccagattgagagctaatcaactatttcagtttcttcatcatatagatgaaataatggtcagacagaaggccacatgataattggtg

SEQ ID NO: 42948 - DNA, 201 bp, Homo sapiens
ctgtagactggaccttaagcagtggaattcttgtctcctgttcaggtgaagtgatctgtgaacctcccaacaacaaactggacaaattcagcggaaccctstactggaaggaaaataagttccctctgagcaaccagaacatgctgctgcggggctgtgtgctgcgaaacaccgagtggtgcttcgggctggtcatctttg

SEQ ID NO: 42949 - DNA, 201 bp, Homo sapiens
gggaaggcagttctttcagccggggaaggtgtggctggttctccctcctggctgcagctgatctagaactctcttgggttgctgaactaagttagtctggrggtagctggcttgaggttggttctagctgccaaagactttggaaaggaggaggcagggacagagtcagagtctgcccttggtcatccagggtcaaaacgg

SEQ ID NO: 42950 - DNA, 201 bp, Homo sapiens
acttacccaggtgtgcctttccactctgcctccaggagtacgcaggggaagggctgaggaccctggtgctggcctacaaggatctggatgaagagtactaygaggagtgggctgagcgacgcctccaggccagcctggcccaggacagccgggaggacaggctggctagcatctatgaggaggttgagaacaacatgatgg

SEQ ID NO: 42951 - DNA, 201 bp, Homo sapiens
ctgcaagatgctgacggatgacatgactgaggttttcatagtcactggccatactgtcctggaggtgcgggaggagctcaggtaaacaagaagcccagggraggcggtgctgtgcgttgtgcccagggctcaggtgggggtttctggaccatttagacttgaatccctgctccccactgccgttctggaagaccacaaccg

SEQ ID NO: 42952 - DNA, 201 bp, Homo sapiens
tagttttcccacgtgaaacaggaacaggagtacttgtctcaccttttaataggatgtcttgatataagatattggcttagaagatacattttaaacttaartgactgtacagttactgggtggtagcctgctcattgtgactgttgccactcccttctgcattactatttaaatgcctttgtgcttacaacctaattttgt

SEQ ID NO: 42953 - DNA, 201 bp, Homo sapiens
gggcttttatatcttgttctaatttcccctgatttcagagaagactggtctcaaaggggactgggaggagctgagactcccaggtgtctcctggaaagacyggctctctcaggtttctctgtgctccaggcccacgcactggaggcagacatggagctggagtttctggagacagcgtgtgcctgcaaagctgtcatctgc

SEQ ID NO: 42954 - DNA, 201 bp, Homo sapiens; identical to SEQ ID NO: 33948

SEQ ID NO: 42955 - DNA, 201 bp, Homo sapiens
agattccccaaatagccctcaactctctcccagcccccaatcttactgctggtgataataaatagaagatacagcatttctgtgctgagagaatatagttwaggcttttccagggtgtgaagaggagagttgggaggttctgggtttagtcctgcctcctcactggccatgtgacctcaggaaaatccacggtcactcagg

SEQ ID NO: 42956 - DNA, 201 bp, Homo sapiens
cttgaatccctgctccccactgccgttctggaagaccacaaccgtatcatttccacctcgacaggaaagcccgggagaagatgatggactcatcccgctcygtaggcaacggcttcacctatcaggacaagctttcttcttccaagctaacttctgtcctggaggccgttgctggggagtacgccctggtcataaatggtc

SEQ ID NO: 42957 - DNA, 201 bp, Homo sapiens
ggagcgggtgtagactggggagcaccgggggccaagatttgggagctgcggccagacggggcggggatggcggccgactggagacgaggggctgtcgggtkcccggggacggggcagagcgggggtctgcgtacaggatgggaggatggggtgccgaaggggcgcgtggagagcaggagagcggcgcgagtgccaaggaga

SEQ ID NO: 42958 - DNA, 201 bp, Homo sapiens
gaggcgggggaaggtgtcttacctttcagttttcttcttttcagttccgccacaagagcgataaccaggtgaataaccgccagtctcaggtgctgatcaayggaatgtgagtgcctgttggagacaagagctctggggacgaagggggtcccttaggaacctctttagctcctgacagcctcttcactgtcttctcgttgc

SEQ ID NO: 42959 - DNA, 201 bp, Homo sapiens
ggctagagtgcagtggctcgatcacagctcactgcaacctccacctcccagattcaagcgattctcctgcctcagcctcccaagtagctgggaccacaggygcatgccaccatgtccggctaatttttgtatttttagtagagacggggtttcaccatgttggctaggatggtcttgatctcttgaccttgtgatccgccc

SEQ ID NO: 42960 - DNA, 201 bp, Homo sapiens
caggcatggtgactcacatctgtagtcccagctactctggaggctgaggtgggaggatcacctgaaccctggaagtccaggatgcagttagctgtgatcgyaccactggactccagcctggacaatgggagtgagaccttgtctcaaaaaaaaaaaaaaaaaaaaagtattttgtaacctgctagctaggactggccttag

SEQ ID NO: 42961 - DNA, 201 bp, Homo sapiens
catcttattttcatggcttaagatttctaggtccagataaaaaccaagggtgccctgggccttgccagctaatgagtgcatagaatccagggatagcaagrgaggcttggagagccttttctttctccagccctgttctttctccaggccctgccaggctggccttcctgccctgggcctgtgtacaggtttgtttctgtg

SEQ ID NO: 42962 - DNA, 201 bp, Homo sapiens
tgggctggtagagagcttcaaccagagcctggatgactggaggcagggagcaagggtgagtgccaaagacagagcactcacccacctgctggtctgctccrgcagaagatacactgtgtatctggcatgagcaggtgtcttcaaggcttccgaatggagcttagacaaaggagggtctgaggctagtatccagccaagccc

SEQ ID NO: 42963 - DNA, 201 bp, Homo sapiens
ggagcgcaaaccgggggcttcagatgctaagtccaggctcttgacagctcactggagacgctggaatcaccttcactgcgcctgtatcagcacccgccacwcaggcgcacaaataaaccttcccagagtgaatgaatgaattaatgactcatccagccccagctgcttccggtgggtcgggggcgtggcgagaccctgttt

SEQ ID NO: 42964 - DNA, 201 bp, Homo sapiens
aggctgctctcgaactcctgacctcaagtgatgcatctgccttggcctcccaaagtgctgagattacaggtgtcagccaccgcgcctgggcttacattcayttttaaaagcgtgatgttctctgggggaggtatctccctaaggtggaaggtggcagtgatttgagttccatgacacttgcacaactcctgccatgcttgg

SEQ ID NO: 42965 - DNA, 201 bp, Homo sapiens
cgaaggactttctttagatccacgtttcgcaagtgtccctgaggccgaggaagaggcgaggggcgcccccggcctcgggcgtctggggcctgcccataagkccgggtcggcgcggcggggcggggagagctgtggccgcgcgcctgctccgccgcacaatcggctgggacaaggcagggaagctgtggcgacctgcagggg

SEQ ID NO: 42966 - DNA, 201 bp, Homo sapiens
taggtcggggggcggatgccggggcttcccaggatgtggagtgtggggcagtgagaggccccccgccccgcctcttcggaaaagcctgagcagcagctccsggggcgcggaagctctgacacctgagagccggtgcaggcgaaagggcgcgaagcgcgggcgcgtcccgcttccctcttccgcccgcagggactcggcgaa

SEQ ID NO: 42967 - DNA, 201 bp, Homo sapiens
gtcgtgggtcacttataccttagtgcaaatcgttttataaatttaaactgattgctcttcccaccaccacgaccacagggagtgctagtttgatagggcarttggaacatggggagggtattgggctggtagagagcttcaaccagagcctggatgactggaggcagggagcaagggtgagtgccaaagacagagcactca

SEQ ID NO: 42968 - DNA, 201 bp, Homo sapiens
gcaaaggtggccatccagtagagaagggcccccaggcaggtctcagtgttccccagaagtcaaaactcagactgccttattgctgcacatcacttcaccaygcacaaagcactttctcaggccacatcccatttaacccccaaagggaggcaggatggtagcatcctgctggggatactttggaacctgctggggcagttg

SEQ ID NO: 42969 - DNA, 201 bp, Homo sapiens
catgtgtaactgtgctaaaaggcaagtgcctctgtggggaggcggcagacacagttgacatgagccaacctgtgtacttcagagaggacacagggctgccragttgcgggtggtaagaggagaggtccagaggatgggatgctctcaagattagctggaggctagaagagataaggggcacaccaaaaaaacaaaaacaaa

SEQ ID NO: 42970 - DNA, 201 bp, Homo sapiens
catcagctccagcaccaccctcggcttccgcatcgagggcatcaaggtgaggcaggcgcgcttcgctggcaccgccgcagccccactgcgcgctgtctttyccgatcccccgctcccgccccgcctgcccctccgccctctcccaccgcctcgccgtcccctgcaactgggaggtaccgctgctctacgctgtcctcttcc

SEQ ID NO: 42971 - DNA, 201 bp, Homo sapiens
tcctcaggtctcctgctggttgttcctgagagttttatcacctatagattgtaaacaacctaagttggctataaatattgttgctaggctgatgacatcasggagggctgaagacagagggaatggcagtaaggtatgaatgaggaggaatgagttcatgttaacccaaggataaagaagatcttcgctgttgcccaataa

SEQ ID NO: 42972 - DNA, 201 bp, Homo sapiens
ggcgtgagccaccgcatccggccaatgcaattgttttcttaattccattttctgcatgttctttgctagtgcatagacatacaatttttttttttttttttgagacggagttttactcttgttgcccaggctggagtgcaatggtgcaatctcggctcacagcaacctccatctcccaggttcaagcgattctcctgtctc

SEQ ID NO: 42973 - DNA, 201 bp, Homo sapiens
aaaaattagctgagtgtggtggtgcatctgtagtcctagctttttgggagactgaggtgggaggacggcttaagcccaggaggtagaggttgcagtgagcyaagatcacgctactgcactccagcctgggtgacagagccagactctgtcacaataaattaataaagtttacaattcatggcttttagtatattcacaagg

SEQ ID NO: 42974 - DNA, 201 bp, Homo sapiens
gcatttcaccgtgttagccaggatggtctcgatcttctgacctcgtgatctgcctgccttggcctcccaaagtgctgggattacaggcgtgagccagcacrcccggccttcattcagcactattgttagttccagctatctagcttgtctacctctccatctcatcctccttcaacttttaggaggtggtcaacttcatca

SEQ ID NO: 42975 - DNA, 201 bp, Homo sapiens
ccatattctctcaccccaactttgggtacatcattgaccaaaggaagacctttacaatcttggagacatcatttaaactgtaaacctttggaatttctagrcttgtgtgggcaaagagagataatgaagtgggaaattattaaaagacccagcatttcggcatggtctctgtctccccagtaagccccttgaacccaggga

SEQ ID NO: 42976 - DNA, 201 bp, Homo sapiens
cttcccttttaattcctacccttcctcctctttctacctccatatccccgtggagcttcccaggagccatgttggtggggaccagagagcccacgcagcasctcagccttcctgtagcctgtgtgctccctctttatgccccctacacatcggggccttctctcccttcagaaggctcagcctgcagaagcctccaaatgt

SEQ ID NO: 42977 - DNA, 201 bp, Homo sapiens
gtttatagccaggacccacaggacaggtggagggctcctccacagggctggggtggctggagtgtaaaggggcgtgaggcagccagatcctcactgtggcmccctttggcacttttgtagtgattctgctgaggccagcctctcggccaccccttccttagtcacttggacacaggtgtctgggctccagcctcttgttga

SEQ ID NO: 42978 - DNA, 201 bp, Homo sapiens
gactttgtggcaccagaggggcctgggtcagggttgagttaagccactctctgtccagctgagagtagctggacttgagactcacagctgaccctgatccycagactgtgcccatttccagttgagcagctttgatctccggagccgcctgtgccgcatcatagctgaggctccccaagaactggccttgcccccagagga

SEQ ID NO: 42979 - DNA, 201 bp, Homo sapiens
cagttcgacaccagcctggccaacataatgaaaccccgtctctactaaaaatacaaaaattagtcgggcatggtggcgcatgcctgtagtcccagctactygggaggctgaggcaggagagtctcttgaacctgggagacagaagttgtggtgagccaagatcactccactgcactccagccagggcaacagagcaagact

SEQ ID NO: 42980 - DNA, 201 bp, Homo sapiens
caactcagaccggcctccgctccaggaccatcgggatgtggtgatgttggacagtgagttcccatggatgtgaggctgagaagtagagagggtacagcctygggcccctccctcttcctgttgtggttggattcagacacatcattattatttcagacactgcatagcctgtgtttctgcagccccattttacagaggaag

SEQ ID NO: 42981 - DNA, 201 bp, Homo sapiens
gtggtgcatgccggtagtcccagttacttgggaggctgaggcgggaggattgcttgagcccaggagtttgaggctgtggtgagctacgattgtgccactgyactccagcatgggtaacagagcaagaccctatctctttaaaaatatatatttacagcctgagcaacatggtaaaaccccgtctctagtaaaaatacaaaa

SEQ ID NO: 42982 - DNA, 201 bp, Homo sapiens
ctgggtggccagctcttgccatcttcttcctctctgatccagttgcttagaaatgcaacagaaatcaccaggcatgaacctgtttactggagcctgtttaytggagcctggtgcatcatataggtatactgtggtctcatgatgtaataggaggtctccctgttccctagacccagatcagaagggcttcatgcacatagg

SEQ ID NO: 42983 - DNA, 201 bp, Homo sapiens
gtacacagggtctaggagaatgaatggctgggccatcagctcagtgaattccttggtccaccagccaagctcatgcccggaggattggctccaggacatgsagcgcctgtcagaggagctgctgctgccactgctgagtcagcccacactgggcagcctgtgggattcccttaggtatgtactgtgtttggtagctggggg

SEQ ID NO: 42984 - DNA, 201 bp, Homo sapiens
tgacatcctggctgtgctcatccgcctggcccggcattccctggaatcagccacaagggtgagaaaaaagggagcagggaatgggcaaaaagcctagctgrgccttgtcttgacccacagcctcccttcctcccttttacctcctgtctcccataggtcctggagtgccctcggctgatagagactatagttcgagagttc

SEQ ID NO: 42985 - DNA, 201 bp, Homo sapiens
gcgctacgtgctggaggtgacatacccaggacctgcggtggtccttgacatcctggctgtgctcatccgcctggcccggcattccctggaatcagccacargggtgagaaaaaagggagcagggaatgggcaaaaagcctagctgggccttgtcttgacccacagcctcccttcctcccttttacctcctgtctcccatag

SEQ ID NO: 42986 - DNA, 201 bp, Homo sapiens
ctggagatgaggtaccacagggataggaatggggcttgggctgggaggtgccagggtccatattcctgtttctgggcatggccccattgctaaggctttgygggcaagatgtagaatgggatggcaggcgtctccctcatctcctaaagtccctaaagcccaggaggcttgcctttatggtttttattggggagcatcctc

SEQ ID NO: 42987 - DNA, 201 bp, Homo sapiens
ggctctgcaccgaggggagctacagcgagtcccaaccctgctactgcccatgcctacggagccgctgctgcccaccgactggcccttcctgccactgattsgcctctaccaccgggcttcagacaccccctcgggactctctcccacagacaccatgggcacagccatgcgggtcctgcagtgggtgctagttttggagag

SEQ ID NO: 42988 - DNA, 201 bp, Homo sapiens
tccgtgctcttcgggctctgctggtggctcctggagatgaggtaccacagggataggaatggggcttgggctgggaggtgccagggtccatattcctgttyctgggcatggccccattgctaaggctttgcgggcaagatgtagaatgggatggcaggcgtctccctcatctcctaaagtccctaaagcccaggaggcttg

SEQ ID NO: 42989 - DNA, 201 bp, Homo sapiens
ggcaaacgaaggattagggcaaagcctctagataacttcagcatcttcagcaaggttttaccctcctgccctcaggcccaggctggtgagtttggggaccrgctagcaggcagtgtcttaagcctccttttggatgctggtttcctcttcctactgcgcttctccttggatgacagagtggatggggtcattgcaaccgcc

SEQ ID NO: 42990 - DNA, 201 bp, Homo sapiens
gaagatcttcgctgttgcccaataaagagaatcagggttcagttgcagagggcccatattctttcttgctcttagggatgaataagagggaacccccacayggagacactgctggagagagtcgtactggggaggcagctggagcagcaagatgctgtcgagaccgaagccaggggagtccgaggtggacctgctgcactt

SEQ ID NO: 42991 - DNA, 201 bp, Homo sapiens
attaaaagacccagcatttcggcatggtctctgtctccccagtaagccccttgaacccagggactggattttactcccatttctttatatttacagccccytgtacaccgctcagcccagagtaaactctcaaaaaattttttgataatgttcttaaggtcacaccgtcatgtgattgtttcaccatttctacccctttag

SEQ ID NO: 42992 - DNA, 201 bp, Homo sapiens
ctgccattccatgtctctcggggctgctgtgctgatttcttctggcccagctcaggccatgccttgcctccagaagtttcccagcttccctctgctcacaraataaggttctggtctcagctgggcaagatattccttctaccttttgtccctgctgaccctgctgctctgcctccttcacttcctgctacaccactctgc

SEQ ID NO: 42993 - DNA, 201 bp, Homo sapiens
cattcagtttcttaggctcaaaatcttgatcctctctccgtattctggtcagttgctagaatttgccgatcttctgtcacctcctcatgatgcctcctgcrctgtggccttgcttccttggtctgctcactctccatgccctccattctccgcccccctgccattccatgtctctcggggctgctgtgctgatttcttctg

SEQ ID NO: 42994 - DNA, 201 bp, Homo sapiens
gttgtgatccctggaaattgagcaaatccccttttatctctttgttccagaggccttgatataaagaggttgagaggaaagtgggatgatgagcatcagtracctgggttttctttttgccccacaggggaaatcagcaacatctggtaagagaagcatctttgcccaggaaattgcggcaaggaggatagctgaagccaa

SEQ ID NO: 42995 - DNA, 201 bp, Homo sapiens
tgaaaggcctgggattaaaggtggggagtgggtgtgggaaggttgctggagcccccagaccacagtcctctttctcttcccattagaggatgcaggctcgrttcagtcttcagggagaactactggcccctgacgtggacctgcccacccacctgggtctgcaccaccatggagaggaggcagaggtgaggcatgggactg

SEQ ID NO: 42996 - DNA, 201 bp, Homo sapiens
aagatgttctagggcaacagggatattggatgctcggggtgggtgaggcttatcagtggagggtgcttcagaaaggtagacttttacccctgaggtcaggwtgggggctgggttagaatcactgccctgaagggaggagggtccgtaaccccccagagtgaggttctcatcgttcagaactgggctaataggatcgggtcc

SEQ ID NO: 42997 - DNA, 201 bp, Homo sapiens
aacctgggttttctttttgccccacaggggaaatcagcaacatctggtaagagaagcatctttgcccaggaaattgcggcaaggaggatagctgaagccawgggcccatcagttggggaagttgtgcccaacgtgggcccaccagagggtgagccggggttgaagaggattgggcttggcctttttaaaagacacaatcat

SEQ ID NO: 42998 - DNA, 201 bp, Homo sapiens
ttctttcttgctcttagggatgaataagagggaacccccacacggagacactgctggagagagtcgtactggggaggcagctggagcagcaagatgctgtygagaccgaagccaggggagtccgaggtggacctgctgcacttccagagtcagtttctcgcagctggtgcagccccagcagtgcagctggtgaagaaagga

SEQ ID NO: 42999 - DNA, 201 bp, Homo sapiens
ggcccatcagttggggaagttgtgcccaacgtgggcccaccagagggtgagccggggttgaagaggattgggcttggcctttttaaaagacacaatcatarggtcatttttgaagatatgtcttcctgcctcaaatgagaggtgcatttgagccatctcaagtagtctgagaatactaggtatgggaggcttgggtccata

SEQ ID NO: 43000 - DNA, 201 bp, Homo sapiens
agccctcatttttggcttttgggtcccattacagggaaagaacatcagggggtccagaggcagccgacttctctgaccagctgtcgttaggaagcagcagrgtccctcggtgtgggcaagggactctgctggctcaggcctgccaggacctccccagcatccgcaactgctacctgactcattgctcgccagcccgagcca

SEQ ID NO: 43001 - DNA, 201 bp, Homo sapiens
gcagaatctgacaaagatcttatgaacatgccagaccagaagcagagaggccagtggaagcactcatttcccagaaactagattatttcattagtgattawcaaaataagaaattgaattatgagagccaggaacctcatgcccccggaggagctccaggccagctgagcaggttgggtgggggtaggcgtgaaggaggaa

SEQ ID NO: 43002 - DNA, 201 bp, Homo sapiens
tccaccttcacggctcaagcagtcctcccacttcagcctcctgtgtagctgggattataggcacacaccaccacactcagctaatttttttttttttttgsggggacagagtttcactcttgttgcctaggctggaatgcaatagcacaatctcggctcaccacaacctccgcctcccgggttcaagagattctcctacct

SEQ ID NO: 43003 - DNA, 201 bp, Homo sapiens
ttttttttttttttttgagatggtcttgctctgtcacccaggctggaatgcagtggcacgatctcggctcactgcaacctccaccttcacggctcaagcartcctcccacttcagcctcctgtgtagctgggattataggcacacaccaccacactcagctaatttttttttttttttggggggacagagtttcactcttg

SEQ ID NO: 43004 - DNA, 201 bp, Homo sapiens
cctggaatcagccacaagggtgagaaaaaagggagcagggaatgggcaaaaagcctagctgggccttgtcttgacccacagcctcccttcctcccttttayctcctgtctcccataggtcctggagtgccctcggctgatagagactatagttcgagagttcttgcccaccagttggtctcctgtgggggcagggcctacc

SEQ ID NO: 43005 - DNA, 201 bp, Homo sapiens
cagcaagatgctgtcgagaccgaagccaggggagtccgaggtggacctgctgcacttccagagtcagtttctcgcagctggtgcagccccagcagtgcagytggtgaagaaaggaaataggggcggtggtgatgccaactcagaccggcctccgctccaggaccatcgggatgtggtgatgttggacagtgagttcccatg

SEQ ID NO: 43006 - DNA, 201 bp, Homo sapiens
tacaggcactgctcccttctctgcaacccgctgtcctgtgtgccagcccttgaagctccccccagcctcgtgtcactgggctgctcgggaggctgcccccrtctcagtctggctggctcagcctcacccttcccattcctcactgccctcctctctcttcttaataccctggcccagatccacaaggggctgtgtggccag

SEQ ID NO: 43007 - DNA, 201 bp, Homo sapiens
agaccggcctccgctccaggaccatcgggatgtggtgatgttggacagtgagttcccatggatgtgaggctgagaagtagagagggtacagcctcgggccsctccctcttcctgttgtggttggattcagacacatcattattatttcagacactgcatagcctgtgtttctgcagccccattttacagaggaagaaaatg

SEQ ID NO: 43008 - DNA, 201 bp, Homo sapiens
cccaacaaatccttggggtcagcaaggggctggagcccaggatggagtgtgtctgtcatatttgagactttcaccccagccccaggagttccagtccctgrgccatgccatttagccataaccgagggtagaagctggcagatcctggaacagaagtggatgtggcagctgctgggtgatggtggggacccctgtggatag

SEQ ID NO: 43009 - DNA, 201 bp, Homo sapiens
gtggctcctggggctgccccacacctcacacctttctctgcatgggccctgcgccatgagtaccacctgcagtacctggcactcgctctggcccagaaagyggtaggtccccctgtctgacaggttctcctgtcatcccattatctccttcctgtttctgtggaacccagcctgcttctgccaggccatgcagctcccact

SEQ ID NO: 43010 - DNA, 201 bp, Homo sapiens
gcaaggggctggagcccaggatggagtgtgtctgtcatatttgagactttcaccccagccccaggagttccagtccctgggccatgccatttagccataaycgagggtagaagctggcagatcctggaacagaagtggatgtggcagctgctgggtgatggtggggacccctgtggatagtgagctgagccgtttgggtaa

SEQ ID NO: 43011 - DNA, 201 bp, Homo sapiens
gtggctcaggcctgtaatcccagcactttgggaggccaaggcaggaggatcacttggggccaagagttcaggggccagcctggacaacatagcaagactcygtctctacaaaaaacaaaaacaaaaaattagctagatgtggtagcacatgactgtagtctcagctactcggtaggctgaggtagaaggatcacttgagct

SEQ ID NO: 43012 - DNA, 201 bp, Homo sapiens
agggagggctgggtgtagtggctcaggcctgtaatcccagcactttgggaggccaaggcaggaggatcacttggggccaagagttcaggggccagcctggmcaacatagcaagactctgtctctacaaaaaacaaaaacaaaaaattagctagatgtggtagcacatgactgtagtctcagctactcggtaggctgaggta

SEQ ID NO: 43013 - DNA, 201 bp, Homo sapiens
atttgaataatagtagtaactggcccgttgcagtggctcacgcctgtaatcccagcactttgggaggcagaggcgggcagatcacctgaggtcgggagttygagaccagcctgaccaacatggagaaacccagtctctactaaaaatacaaaattagctgggcgtggtggcacatgcctataatcccagctactagggaga

SEQ ID NO: 43014 - DNA, 201 bp, Homo sapiens
aaaaaattacagccaggtgtggaggctcacgcctgtaatcccagcactttgggaggctgaggtgggcggatcacaagatcaagacattgagaccatcctgrccaacacggtgaaatcctgtctctactaaaaatacaaaaattagctgggcgtggtggcacacgcctgtagtcccagctactcgggaggctgaggcaagaa

SEQ ID NO: 43015 - DNA, 201 bp, Homo sapiens
gatactgttctatgctatgcctcacccctagtgtctgttcaccaaaatgccaggcactcagtcaatcttgttacccactgtatactagcacctctatagastataatacgtgttagggctcagtatggtgccttgccctgtaattccagcactttgggaggttgaggtgagaggattgcttgaggccaagagtttacgacc

SEQ ID NO: 43016 - DNA, 201 bp, Homo sapiens
ccactggccttggcctcccaaagtgctggagccactgcgcctaggttttttttttttttttaagacggatttttcctcttgttgcccaggctggagtgcartggcgcaatctctgctcactgcaacctctgcctcccaggttcaagcaattctcctgtctcagcctccaaagtagctgggattacaggcgcctgccaccat

SEQ ID NO: 43017 - DNA, 201 bp, Homo sapiens
atagatctcgggcacggcccttcaacgggcggcgaaagctgcgactcggtgattcctcattgtagagttgggtggtccaggaggcttaactggagcccttracctgagcggtaagggcagtcacgcgtcccgactcgggattggatcctggctctggaggataggctgcaatgtaagagccccagagactcctcagaggcc

SEQ ID NO: 43018 - DNA, 201 bp, Homo sapiens
aaagaggggccatcaatgcccagggtccagctgcatttgtcagtgggtttctctctccaactcccaggggctcctggctaccagcctgctgcctcggctgygctacgtgctggaggtgacatacccaggacctgcggtggtccttgacatcctggctgtgctcatccgcctggcccggcattccctggaatcagccacaag

SEQ ID NO: 43019 - DNA, 201 bp, Homo sapiens
cctgcctgcgggcctttggtctgtaagggagcaactgtggcctcctctgtgcatagatctcgggcacggcccttcaacgggcggcgaaagctgcgactcgrtgattcctcattgtagagttgggtggtccaggaggcttaactggagcccttgacctgagcggtaagggcagtcacgcgtcccgactcgggattggatcct

SEQ ID NO: 43020 - DNA, 201 bp, Homo sapiens
ctcctgcctcagcctcccgagtagctgggaatacaggtgcccgccaccacgcccggctagttttttatatttttagtagagacggggtttcaccgtgttarccaggatggtcttgatctcctgacctcataatccacacgccttggcctcccaaagtgctgggattacaggcgtgagccaccgcatccggccaatgcaatt

SEQ ID NO: 43021 - DNA, 201 bp, Homo sapiens
atcactgcaagctccgcctcccgggttcacgccattctcctgcctcagcctcccgagtagctgggaatacaggtgcccgccaccacgcccggctagttttytatatttttagtagagacggggtttcaccgtgttaaccaggatggtcttgatctcctgacctcataatccacacgccttggcctcccaaagtgctgggat

SEQ ID NO: 43022 - DNA, 201 bp, Homo sapiens
tgtctgacaggttctcctgtcatcccattatctccttcctgtttctgtggaacccagcctgcttctgccaggccatgcagctcccactttcctccagacaygccctggacctgtgcccttcagcctcacttttatcctcttcctcacttctctctgccacgtccccttctcctgtactaggtagttccctgcttttctgtc

SEQ ID NO: 43023 - DNA, 201 bp, Homo sapiens
gcatctgtagtcctagctttttgggagactgaggtgggaggacggcttaagcccaggaggtagaggttgcagtgagccaagatcacgctactgcactccakcctgggtgacagagccagactctgtcacaataaattaataaagtttacaattcatggcttttagtatattcacaaggttgaacattttcattactccaaa

SEQ ID NO: 43024 - DNA, 201 bp, Homo sapiens
gtgaaaccccatttctactaaaaatacaaaacttagctgggcgtggttgcgggtgcctgtagtcccagctactcaggaggctgaggcaggagaatcgcttsaacccgggaagcggaggctacagtgagccgagatcgcgccactgcaccccagcccagtgacagagcaagaccctgtctcaaaaaagaaaaaaggaaaggg

SEQ ID NO: 43025 - DNA, 201 bp, Homo sapiens
tagtctttaaccctgatccttgtgctagaaggacagatgtttgtctaggacctgatctctgccctcatgatttggtttcatgtgatcgttatccacacacsttatgtatgtatatacattcctaccctccccctcagcacgtcatttcccctgtcacagttgcctgtgtccctggagtgttacacagtgcctcctgaagac

SEQ ID NO: 43026 - DNA, 201 bp, Homo sapiens
tctcctgtcatcccattatctccttcctgtttctgtggaacccagcctgcttctgccaggccatgcagctcccactttcctccagacatgccctggacctstgcccttcagcctcacttttatcctcttcctcacttctctctgccacgtccccttctcctgtactaggtagttccctgcttttctgtctgcaggcagcgc

SEQ ID NO: 43027 - DNA, 201 bp, Homo sapiens
gcctgtgggattcccttaggtatgtactgtgtttggtagctgggggaagcaggggaggaggcaatttctttccttgtgggattcctgggtccagctcccakgtccatcccagggtgcaggccctcggcccgagggaaacccgagtccctagcaggcagcagtggggtgggctctgaggagtgtgagcagcactgacctcca

SEQ ID NO: 43028 - DNA, 201 bp, Homo sapiens
gccttcctgtagcctgtgtgctccctctttatgccccctacacatcggggccttctctcccttcagaaggctcagcctgcagaagcctccaaatgtgctcytttgggctgttgggatggtggcattggcctgggtacacagggtctaggagaatgaatggctgggccatcagctcagtgaattccttggtccaccagccaa

SEQ ID NO: 43029 - DNA, 201 bp, Homo sapiens
tgaggaaaaccttttcatataagtactagggaagcagtgagtggagaagccacctggagtccctgtgccagacccagtggggtctccactctgaggaaagyttgggtctatacctgtctccagggctaatagccttatagaagaaggccaaaaagcccagttagagccctggaggacagagcaatgaatgtgatcatacct

SEQ ID NO: 43030 - DNA, 201 bp, Homo sapiens
tgtggcagctgctgggtgatggtggggacccctgtggatagtgagctgagccgtttgggtaatactatcatgctttgtctccccagctctggcattgcccrtgacccctcagaaagaatggctgcacatggacactgtcgagctggagaagctccactggacccaggacttgccccctgtccggcggcagcagacacagga

SEQ ID NO: 43031 - DNA, 201 bp, Homo sapiens
ccaacattttgggaggccaaggtgggaggattgcttgaggccaagagtttctgaccagcttgggcaagaaagctagacaccatctctacaaaaaattattsgaaaattagccagacctggtgatttgcccgtagacccagttactcaggagcctgaggcaggaggatcacttgagctcaggaggttgaggctgccagtgag

SEQ ID NO: 43032 - DNA, 201 bp, Homo sapiens
gttcctctggcaggagctcctcgacagcaccttctcttggtaccatggagctttgacgttccctctgatgcccagccaggaggacaaggaggatgaggacraggatgaagaatgcccagcaggaaaagcaaaaaggaaaagccctgaagaagaaagccggcctccacctgacctggcccgacatgatgtcatcaaggtaaa

SEQ ID NO: 43033 - DNA, 201 bp, Homo sapiens
tgggcatggccccattgctaaggctttgcgggcaagatgtagaatgggatggcaggcgtctccctcatctcctaaagtccctaaagcccaggaggcttgcmtttatggtttttattggggagcatcctctctactcctggatccatttcctggccccttcagcattgccccccaactcccgttcctctggcaggagctcct

SEQ ID NO: 43034 - DNA, 201 bp, Homo sapiens
ggtgcctggctttcctgctgagaccaggctaggagaggaataccacttattgagctaggcttactgtgagttccgggcactgtgctgagtactttaatgcyttttttttttttttttttttttttgagatggtcttgctctgtcacccaggctggaatgcagtggcacgatctcggctcactgcaacctccaccttcacgg

SEQ ID NO: 43035 - DNA, 201 bp, Homo sapiens
cgagctggagaagctccactggacccaggacttgccccctgtccggcggcagcagacacaggaggtgaggagggccacctggcctacaaggggtgggtgakatagggcaggagaggagctgctgctcttgccctcagaactcaggcctttctattgcccagagcctgagaagcatctctcctttgctctcacccaccttta

SEQ ID NO: 43036 - DNA, 201 bp, Homo sapiens
gttagaatcactgccctgaagggaggagggtccgtaaccccccagagtgaggttctcatcgttcagaactgggctaataggatcgggtccagcctggggaagtttctccattgtgcttcacaactttgtgctttgttgctacaggaacgagatacaagttcagtggccgtgaatctgcctgtgcccagtggtgttgctttc

SEQ ID NO: 43037 - DNA, 201 bp, Homo sapiens
tgcttgcaggagaacatcctcattgtgtccagttctcagtgccccgtggttagcaggagcagatggatatcaggctcttctccctctggtatgggggttckaggtcaggtatctgattttttccagttctgtcaattcagattggagaattggacactgcaggtttcatatccgtcatatagttgagatgtctagaaagac

SEQ ID NO: 43038 - DNA, 201 bp, Homo sapiens
gccagcctctgcaaccctctgggcagagatctgagggacgggacagctggggctgggggacgcggggagaggtgaaggtcaagtggccgcatgaggcccayagcactctctgccttaggttgctcgctcccaccatcccaggggtgatgccaagtgattccaaatagtggagctcccaggtagctcaagaactgattctaa

SEQ ID NO: 43039 - DNA, 201 bp, Homo sapiens
tttttttttttttaaattagttacctaaacggtcattatggagatgcagctgcccagaacaagccagaccaagtggccatgaggctgtcttctaactctgkggtaatgtcctgcagccggggcctggctgggttcttctcattgttggctctttaactaaaaccagtgttgctgaatgtgactgtgaaattggcataatca

SEQ ID NO: 43040 - DNA, 201 bp, Homo sapiens
ggagatgatattcctcacaagtgttttatgcaccaaagtaatgcttaacagaggaaacctgaagccggaggaagctgtgagggtggctctatgactgctcwgtcaacaggcaagttctcatggcatccctcagggccactgctcatgcttgagaaaagcctaactccaggcagtgcccttcacagactatgcaaataaccc

SEQ ID NO: 43041 - DNA, 201 bp, Homo sapiens
ccaaccccggggtcttaaatgatattatattataatattataataagcagtaaacaatgatataataattatgttggctcagagctttacagtttgcaaakactttttgcagaggaagagtagtttagaaaggtgatatttgttcagggtaaatgataggtgatgcccgggtctccaactcaggtggaggggcacctccct

SEQ ID NO: 43042 - DNA, 201 bp, Homo sapiens
agagacaggatttcaccatgttggccaggctggtctcaaacttttgtcctcaagtgatctgcccgccttttcctcccaaagagctggaattacaggcatgrgccaccgcgtcctcagttctcatcttaaagaagcaatgatatttacttcgggggctgtggaaaggactgaagagatatacacaaagcacctaccacacag

SEQ ID NO: 43043 - DNA, 201 bp, Homo sapiens
tgtcctcaagtgatctgcccgccttttcctcccaaagagctggaattacaggcatgagccaccgcgtcctcagttctcatcttaaagaagcaatgatattwacttcgggggctgtggaaaggactgaagagatatacacaaagcacctaccacacagtaggcttttaatcccacctcacccctgattccaagggattaaat

SEQ ID NO: 43044 - DNA, 201 bp, Homo sapiens
tcttaaagaagcaatgatatttacttcgggggctgtggaaaggactgaagagatatacacaaagcacctaccacacagtaggcttttaatcccacctcacscctgattccaagggattaaatcctggctgctagtggcctgctgtgtaattttagctaaactgcctcctctccttcaatctgttccacaaggttaaaggga

SEQ ID NO: 43045 - DNA, 201 bp, Homo sapiens
tagctaaactgcctcctctccttcaatctgttccacaaggttaaagggagatacttaagtccctgagagtgtttaattagagtttgcaatgtgactggatrctgttggttgaaaagtgttatttagaggcaaagtgctgttatttttgagcagataattgtttcctgtcctaagttgtttaaccttgtaccgagttccctt

SEQ ID NO: 43046 - DNA, 201 bp, Homo sapiens
atacttcacctaggtgttgtgagttttagttaattaacgcttttgaaacctacacaagcctatcataaaaggctaaacgttgattatttacctttcatatrgttgtcacttccagtatcttaatactatctagtaaaaattggcattgcagcattggatcaggtaatatttactttataatcgtgttgggggctctaactt

SEQ ID NO: 43047 - DNA, 201 bp, Homo sapiens
gtgttgtgagttttagttaattaacgcttttgaaacctacacaagcctatcataaaaggctaaacgttgattatttacctttcatatggttgtcacttccrgtatcttaatactatctagtaaaaattggcattgcagcattggatcaggtaatatttactttataatcgtgttgggggctctaacttacgactatgcaaa

SEQ ID NO: 43048 - DNA, 201 bp, Homo sapiens
tgtcacttccagtatcttaatactatctagtaaaaattggcattgcagcattggatcaggtaatatttactttataatcgtgttgggggctctaacttacractatgcaaaaagctttgtgctttttacaagaaaggggttagggaagtattgatagctattgtttttctaccatggcacaacttataacagatttacatt

SEQ ID NO: 43049 - DNA, 201 bp, Homo sapiens
acttttttggcagagaagccgcatagtctttgtaagtgccaagaaggggacgtacaaagtcccattgatctaatttgggggctcagggaagctgagcttcraaggataagtatgaacgaactagcaaggggatctgggggcagtgaagaacattccagtctaggaaagcttcctgttgtgagaaggcacttggcaagttca

SEQ ID NO: 43050 - DNA, 201 bp, Homo sapiens
ttcccttacgccaacttctcacactcccccaccaacttctcaacatgctgaggctcaggatctcattgatgtttgaggcccaatagtaaggtaaatccatmttaataatcaaaatatacattttagttcttgggcactttgcctagagtgcatgatctttcctttgagccttatatgaaggtgtcctggactgaaccacac

SEQ ID NO: 43051 - DNA, 201 bp, Homo sapiens
ctcccatctcatcctccaactcctctctcctgctgttgccttccatcgactaaaaccaaccaaagccagggcccaggggagcctgtggtgcagtccattamaggtcagcacagagaaagaggatgaacctggggagaaatgtaaaacatctgccacacctgccgctttttatctaccctttagccaatatgtttccaaact

SEQ ID NO: 43052 - DNA, 201 bp, Homo sapiens
aggctctggagggcagcaaccttatcttcgcctttccattgcctaatttcccccagaggcctggcctcgtgtcttaacgtacgttatgcccttagttattmatgctaagtccaatggaattaagatcgttagtaatggatttcaagcttgttatcttggtaatcatttggtacaaaactttgttaatgcttaatttatgct

SEQ ID NO: 43053 - DNA, 201 bp, Homo sapiens
tggagggtgaatagagcttggttctagttccaaagtttcattcagcaccctgggtcaccctggatgagtgacgtggccactccgactctcagtgtcctcaygagaagcatcacaggctacactgacaaaaacatataagagaataaaatccaaattccgcaagccggaatttggctctcctcacttaaacttagctgcctt

SEQ ID NO: 43054 - DNA, 201 bp, Homo sapiens
aaatgattcgcacaagcaaaaaatgactagtaatctatacattagtacttctctaccaatccatctgcagtggactgaatgttgaatgctaggtgttctcyaatgaggggggattttcacctcaggtatataaaatggtatatattatcattttatggtagattaaaaccacagaaacaaaggctgtttagggtcctcaat

SEQ ID NO: 43055 - DNA, 201 bp, Homo sapiens
ggaaatctaaatgattcgcacaagcaaaaaatgactagtaatctatacattagtacttctctaccaatccatctgcagtggactgaatgttgaatgctagstgttctctaatgaggggggattttcacctcaggtatataaaatggtatatattatcattttatggtagattaaaaccacagaaacaaaggctgtttaggg

SEQ ID NO: 43056 - DNA, 201 bp, Homo sapiens
ataaagaagaaacttccactgagaggaaaatcaatctaattttttttttttgagacagtctcgctttgttgtccaggctggagtgcaatggtgcgatcccrgctcactgcaacctctgcctcctgggttcaagtgattctcctgcctcagcctcctgagtagctgggattacaggcatgtgccaccacgtgcagctaattt

SEQ ID NO: 43057 - DNA, 201 bp, Homo sapiens
ttgggggctctaacttacgactatgcaaaaagctttgtgctttttacaagaaaggggttagggaagtattgatagctattgtttttctaccatggcacaayttataacagatttacatttcaaatcctcatctcatataaaaccatacaaactgactaaaaaagctaaaattgcgaaatactgagagaggtattttacata

SEQ ID NO: 43058 - DNA, 201 bp, Homo sapiens
ccagctcactgcaacctctgcctcctgggttcaagtgattctcctgcctcagcctcctgagtagctgggattacaggcatgtgccaccacgtgcagctaakttttgtatttttagtagagaggaggtttcaccacgttgcccacactggtctagaactcccgacctcaggtgatccacccacctcagcctcccaaagtgct

SEQ ID NO: 43059 - DNA, 201 bp, Homo sapiens
tagctattgtttttctaccatggcacaacttataacagatttacatttcaaatcctcatctcatataaaaccatacaaactgactaaaaaagctaaaattrcgaaatactgagagaggtattttacataatggttaacaagtttttaaagctagcatgtatcaagacattatgtgtcaggcactgttctaaacctcatgca

SEQ ID NO: 43060 - DNA, 201 bp, Homo sapiens
ctgacacatttagacaatctcttattgatggagatttagttttttccagttctttgatatcataaacactgcttcaggtaacatcatttgacatgcaaacwtttgtagttgatcatttccttagaataaaaccctaggattgcagttaatggttcaaatggtacatgctgaaaattctgataatctggcctttaggaagtc

SEQ ID NO: 43061 - DNA, 201 bp, Homo sapiens
gcgaaatactgagagaggtattttacataatggttaacaagtttttaaagctagcatgtatcaagacattatgtgtcaggcactgttctaaacctcatgcrtgcattaaagctaaagtaggcataggctgggtgcggtggcttacgcctgtaattccagcactttgggaggccgaggcaggaggattgcttgagcgcagga

SEQ ID NO: 43062 - DNA, 201 bp, Homo sapiens
agtgattctcgtgcctcagcctcccaagtagttgggattacaggcacctgtcaccatgcccggctagtttttgcatttttagtagagacggggtctcatcrtgttggccaggctggtcttgaactcctggcctcaaaggatccgcccacctcagcctcccaaagtgctgggattataggcatgagccaccacgcccggcct

SEQ ID NO: 43063 - DNA, 201 bp, Homo sapiens
agcggtcagattaatagatctaaaaattatgttcctaaatctgttcattatctggcgaagcttggagtaatttgaaactaagggaaagataaaaaggggaragtattctgtcatctgtacaccagattttaaaatctgtttagaggaggaaggaagcaagccagggtggaaacttccattcttcagcccaggccattagag

SEQ ID NO: 43064 - DNA, 201 bp, Homo sapiens
gcaagccagggtggaaacttccattcttcagcccaggccattagaggcgcagccccgactgagtgacacatcagaactaaggatgggctctttcttctttycctcctgtccccctgcgcctccctttccccaactggaggagaggtttggcgagtctctctgcctgaggtggcaagttcagccggacctcagctgcttgct

SEQ ID NO: 43065 - DNA, 201 bp, Homo sapiens
atgtggtagtgctattaatacccccattttacagatgaacaaactaaggaacagagaagttaagcaacttctctaagatagcacagtagtgagcagcagarcctaactacaaactcagtctggcaccgaagtccataacctaactgttctctatatttccttttgattccaggacctgcatggtactgtgtgcctaacagg

SEQ ID NO: 43066 - DNA, 201 bp, Homo sapiens
atagcacagtagtgagcagcagagcctaactacaaactcagtctggcaccgaagtccataacctaactgttctctatatttccttttgattccaggacctrcatggtactgtgtgcctaacaggtacattcaatacatatttgtttaataaatgaaggaacagttctaacgggaaaataaaagttacctgtaatcctacca

SEQ ID NO: 43067 - DNA, 201 bp, Homo sapiens
actcagtctggcaccgaagtccataacctaactgttctctatatttccttttgattccaggacctgcatggtactgtgtgcctaacaggtacattcaatamatatttgtttaataaatgaaggaacagttctaacgggaaaataaaagttacctgtaatcctaccacatgttttgagattcattctatagatatttcttct

SEQ ID NO: 43068 - DNA, 201 bp, Homo sapiens
gccataataaataaaattatcttttaaacctctcagtttaaaattctaaaaaaaaagcgccttggaactgctcatttagttttgggaaatctaaatgattygcacaagcaaaaaatgactagtaatctatacattagtacttctctaccaatccatctgcagtggactgaatgttgaatgctaggtgttctctaatgaggg

SEQ ID NO: 43069 - DNA, 201 bp, Homo sapiens
ttttagaaatagttattttcattaaaaactgctattttgttaatatgacatggatttattactttttaaatgccataataaataaaattatcttttaaacstctcagtttaaaattctaaaaaaaaagcgccttggaactgctcatttagttttgggaaatctaaatgattcgcacaagcaaaaaatgactagtaatctat

SEQ ID NO: 43070 - DNA, 201 bp, Homo sapiens
ctgaaagactgaggcttcctgttagaaagcattccattgtgggaatgggcacctgccttaagagttctaatgagtgtccacccctgaaaaaagaaactgcrtgaagctcgtgctaaaaatggtcatgtgtcattgtgtgtgggtcattaaaccaccatgtcagtcatcagctttgagctgccctttaatccaaggggcact

SEQ ID NO: 43071 - DNA, 201 bp, Homo sapiens
gtaatcccagctacttggggggctgagccagaagaattgcttgaacccgggagctgagattaggccactgcactccagcctgggcaacagagtgagactcygtctcaaaaaaaaaaaaaaaagtcacaggtaggaaatacaaccaataaatcagcatataggaacagacttatttcctttagtcacagaggaaatgcaaat

SEQ ID NO: 43072 - DNA, 201 bp, Homo sapiens
ctgtggactccggccaaagctcggctcattgacctttggaaggtcaagagtcagggaggcagcaggtgtttagcaaccactgttatatgtacgtaatggaytctaatagaagcagatgacagggtctgaaagactgaggcttcctgttagaaagcattccattgtgggaatgggcacctgccttaagagttctaatgagtg

SEQ ID NO: 43073 - DNA, 201 bp, Homo sapiens
accatgggagattttacaatcatgcacatgcctccatcccacctactgtctcagcatcgccagcggtggggctctggtaggaatattgcttttaaatctcyccaggtgattccgataagcccccttggttaagaatcatggttacagcccacggagggtggtcctgtaggcttttgatcattgcccacatgggggattctt

SEQ ID NO: 43074 - DNA, 201 bp, Homo sapiens
ccacggagggtggtcctgtaggcttttgatcattgcccacatgggggattcttatcctgtataacaaacagctcccaccatccctactctctccttatgawgagcaaaagtcttctctgttgggtttcacctgagccccccagtcccaggaacaagcctcatccctcttctcagggctgatttcttcccattcctaaggac

SEQ ID NO: 43075 - DNA, 201 bp, Homo sapiens
ctgaggcttcctgttagaaagcattccattgtgggaatgggcacctgccttaagagttctaatgagtgtccacccctgaaaaaagaaactgcatgaagctygtgctaaaaatggtcatgtgtcattgtgtgtgggtcattaaaccaccatgtcagtcatcagctttgagctgccctttaatccaaggggcactcatgaagc

SEQ ID NO: 43076 - DNA, 201 bp, Homo sapiens
ctctatctttacaaaataaataaataaataaaatttaaaaattatacttctttggctgggtgtggtggctcatgcctgtaatcccagcactttgggaggcygaggcaggtgggttatgaggtcaagagatcaagaccatcctggccaacatggtgaaatgctgcctctactaaaaatacaaaaattagctgggcttggtgg

SEQ ID NO: 43077 - DNA, 201 bp, Homo sapiens
tagtctagaccctacagaagtacattaagtaccaagacagggaccaatgttccagactaaataatacttttttatgatagacaagctggaaagacaagcamaaccaagtgtaaaatcaaatctcacagtgaatccactgctggggagtgatgagaagatacacatgacttatgaattaaaatcttgtaacttacataatcc

SEQ ID NO: 43078 - DNA, 201 bp, Homo sapiens
ttatgaggtcaagagatcaagaccatcctggccaacatggtgaaatgctgcctctactaaaaatacaaaaattagctgggcttggtggcacgtgcctgtastcccagctactcgggaggctgaggtgggagatggcgtgaacctgggtggcggatgttgcagtgagccaagattgcgccactgtactccagcctggtgaca

SEQ ID NO: 43079 - DNA, 201 bp, Homo sapiens
aaagacaagcacaaccaagtgtaaaatcaaatctcacagtgaatccactgctggggagtgatgagaagatacacatgacttatgaattaaaatcttgtaayttacataatccctgaggaattattgattgaagggaggactatatattctttctgttagaagattaaatctctctctgatgggacttgtcctttatgaagc

SEQ ID NO: 43080 - DNA, 201 bp, Homo sapiens
catggtgaaatgctgcctctactaaaaatacaaaaattagctgggcttggtggcacgtgcctgtactcccagctactcgggaggctgaggtgggagatggygtgaacctgggtggcggatgttgcagtgagccaagattgcgccactgtactccagcctggtgacagagtgagactctctctcaaaaaaaaaaaaaaaaaa

SEQ ID NO: 43081 - DNA, 201 bp, Homo sapiens
ggcatgagccaccatacccagcctggaatggattttgatgcatgaggaaaactccaaattttataattccatacttcaaatgtgttttgtgaatgtgtatrtgatgattagatattaacctcggcagaacaaaacatttatttttcatgtcttgtatacattttcttttttttttttttgagtaggagtctcgctctgtca

SEQ ID NO: 43082 - DNA, 201 bp, Homo sapiens
ctgcctctactaaaaatacaaaaattagctgggcttggtggcacgtgcctgtactcccagctactcgggaggctgaggtgggagatggcgtgaacctgggwggcggatgttgcagtgagccaagattgcgccactgtactccagcctggtgacagagtgagactctctctcaaaaaaaaaaaaaaaaaaaaaaaaagacat

SEQ ID NO: 43083 - DNA, 201 bp, Homo sapiens
tgggcttggtggcacgtgcctgtactcccagctactcgggaggctgaggtgggagatggcgtgaacctgggtggcggatgttgcagtgagccaagattgcrccactgtactccagcctggtgacagagtgagactctctctcaaaaaaaaaaaaaaaaaaaaaaaaagacattatacttctttaaatcaatgtgttttaaa

SEQ ID NO: 43084 - DNA, 201 bp, Homo sapiens
acagggctaacctcaccaaagagcaaggaaaaccagcaaagttttctggtaaaacacaggcaggaagtttctccaaatactgctttactcgcacttttaaraggctttcctcccttccccccaacttctaaaatagtttcaggataacaaatttgtaacagctggtcatcaaattcatgcgcactcccaaaaggacgacag

SEQ ID NO: 43085 - DNA, 201 bp, Homo sapiens
tagaattaccagagcataatcaaatgcagtcattacagagggagcctatatcatgttacctttgaaaatattttaatctagaaacatcatacactgtatayaaaattcatgaatccctgacgcctgggcgtggccttggacatattattctgagccatctcctattttctttcatatgtaaatgttattcttgagctagga

SEQ ID NO: 43086 - DNA, 201 bp, Homo sapiens
catcatacactgtatacaaaattcatgaatccctgacgcctgggcgtggccttggacatattattctgagccatctcctattttctttcatatgtaaatgktattcttgagctaggaataggagagaaagagaaaattgaaacagccagaccaagtgtttttgaatgctcttaaaagacaaaaaaaaaaaaaaagacaaaa

SEQ ID NO: 43087 - DNA, 201 bp, Homo sapiens
agagaaaattgaaacagccagaccaagtgtttttgaatgctcttaaaagacaaaaaaaaaaaaaaagacaaaagtttgtatcacatcagaagttccctacrtgctcttcaaagctgattgcttgcagttaaaagaacccagaagaagcaggcacgccatgattttgaagctccgtttttgttctgttattcaactgcagtc

SEQ ID NO: 43088 - DNA, 201 bp, Homo sapiens
atcttcgagcctgttagcctttccaaattccccagtttagtcaggtctaccacattcttctcacttcccaagctgagaaactcaagcattgtctgtgagayttacagtgtcagtcagggttctggcagggaccagatggttactcaaatggggcaacggaggagagtttaacaaaggcattagtttacaacagtgtgggca

SEQ ID NO: 43089 - DNA, 201 bp, Homo sapiens
tgaggttgggtcagcttgtggttgagcttcctgccttcctgtttgtaactgaatttttcaaattaaaaaaacatccactttgttctggcatagttgtatayattattccaatatatttaacaatgaggctgttctcatttcacacagaatagcacacagtgaagacagtcagtgagaaccagagctattgttacaactgac

SEQ ID NO: 43090 - DNA, 201 bp, Homo sapiens
cacagatctcaggcctgggcacagagcccagcctccctcgcaccctacagatcctctagcagtggtcctcaactggggagaccatcaaaatcaccatgggmgattttacaatcatgcacatgcctccatcccacctactgtctcagcatcgccagcggtggggctctggtaggaatattgcttttaaatctccccaggtga

SEQ ID NO: 43091 - DNA, 201 bp, Homo sapiens
tagttacctaaacggtcattatggagatgcagctgcccagaacaagccagaccaagtggccatgaggctgtcttctaactctggggtaatgtcctgcagcyggggcctggctgggttcttctcattgttggctctttaactaaaaccagtgttgctgaatgtgactgtgaaattggcataatcaagatcacttacctcttc

SEQ ID NO: 43092 - DNA, 201 bp, Homo sapiens
attggataattaatattagtgaaagacagcattttttttttttcagacaaagtctcactcttgtccaggctggaatgcagtggcacaatcatagctcattrcaacctcaaactcctggactctgggatcctcccacctcagcctcctgagtagcagggactacaggtgcatgccaccactcccagctaattaaaaaaaatt

SEQ ID NO: 43093 - DNA, 201 bp, Homo sapiens
ttttaaaggttttactaagtataatgaaagtattttgacattaaagaaccatttttattaagcactcaaggtactaaatttctctcttctaaattcctagtctagaccctacagaagtacattaagtaccaagacagggaccaatgttccagactaaataatacttttttatgatagacaagctggaaagacaagcacaac

SEQ ID NO: 43094 - DNA, 201 bp, Homo sapiens
cttgcagcgagcagagatcacaccactgcactccagcctgggcaacagagcgagactctgtctcaaaaaaaaaaaaaaaaaaaaaattaaaaaaaaaaaaagaaagttggccccaaaagaatgaaaacggaataaaaaatgtgtttagagtcttgcctctttctgtactagaggaaaaggagatcaattccgggagaaaac

SEQ ID NO: 43095 - DNA, 201 bp, Homo sapiens
ccccccagtgaagttaaaaaaaaattttttttgaggcagggtcttgctttgttgcccaggctggagtgcaatcttggctcactgcagccttgacctcctcrgctcaagtgatcctcctggcacagcttcctgggtagctgggagtacaggcatgtgataccacagctagctactttttttttttttttggtagagatgggg

SEQ ID NO: 43096 - DNA, 201 bp, Homo sapiens
cctcccgcctcagcctcctgagtagctaggactataggtgcacattaaaaaaaaaaaatttgtagagacagagtcttgttatgttgcccaggctagtctcraactcctgacctcaagtgatcttcccaccttggtcacccaaagcactggaattacaggtgtctggccccccagtgaagttaaaaaaaaattttttttgag

SEQ ID NO: 43097 - DNA, 201 bp, Homo sapiens
tggcccagagccatgcctccagctctgccttctgttatgtcacacttggttctgcactggcttctctgtagatgacacatttccaaataataatagggttmattgattgaagacgtattatgccagatggtataacaaagtaggggttttccaggtgtaatcggagggtccctggggtttcctgaaaccctttcggggggg

SEQ ID NO: 43098 - DNA, 201 bp, Homo sapiens
cctcaggtatataaaatggtatatattatcattttatggtagattaaaaccacagaaacaaaggctgtttagggtcctcaattttaagagtgtaaaagggwtctggaatcaaaagtttgaaaactgttgccagtgtatgtcacataactctcacaacatccctgtaatgcaggaatgattatctttattttatagataagg

SEQ ID NO: 43099 - DNA, 201 bp, Homo sapiens
catatctcactgcagccttgaactcctgggctcaagtcatcctcccgcctcagcctcctgagtagctaggactataggtgcacattaaaaaaaaaaaatttgtagagacagagtcttgttatgttgcccaggctagtctcaaactcctgacctcaagtgatcttcccaccttggtcacccaaagcactggaattacaggtg

SEQ ID NO: 43100 - DNA, 201 bp, Homo sapiens
agtgcagtggtgatcatatctcactgcagccttgaactcctgggctcaagtcatcctcccgcctcagcctcctgagtagctaggactataggtgcacattwaaaaaaaaaaatttgtagagacagagtcttgttatgttgcccaggctagtctcaaactcctgacctcaagtgatcttcccaccttggtcacccaaagcac

SEQ ID NO: 43101 - DNA, 201 bp, Homo sapiens
caacaaacatttatcatcttagagtttctgtgggtcaggaatttgggagcactttagctgggtggttcaggctcagggtctctcatgaggtttggtcaagwtgtcagccaaggatgccgtcatctgagggcttgactggggctggaagatctgcttccaagatggctcactcacatgagcattggcaggaggtctcaattc

SEQ ID NO: 43102 - DNA, 201 bp, Homo sapiens
aaaaaaaaaaaagacaaaagtttgtatcacatcagaagttccctacgtgctcttcaaagctgattgcttgcagttaaaagaacccagaagaagcaggcacrccatgattttgaagctccgtttttgttctgttattcaactgcagtcaacttccaactgttgaaaaaaagatgatttagaattaaagggttgcttgtctgt

SEQ ID NO: 43103 - DNA, 201 bp, Homo sapiens
ctcctgagtgtgagtgaagcctggctacttgacaccaatgaataagacaggagacctggagggagaacgaggggaagacagagagaagaagaagaagagggaaagggaaggggagaagggagccttggtgacagagaaggcagatttcttggccactgactcgtcttttttcctttatctgtctttcttcttgttttccat

SEQ ID NO: 43104 - DNA, 201 bp, Homo sapiens
aagatgtcagccaaggatgccgtcatctgagggcttgactggggctggaagatctgcttccaagatggctcactcacatgagcattggcaggaggtctcarttccccgacatgtgggcctctccaataggctgcttgagtgtcattatgacatggcagccagcttcccccagagcaagtgatccaagagagaaataccgag

SEQ ID NO: 43105 - DNA, 201 bp, Homo sapiens
gtttgtatcacatcagaagttccctacgtgctcttcaaagctgattgcttgcagttaaaagaacccagaagaagcaggcacgccatgattttgaagctccktttttgttctgttattcaactgcagtcaacttccaactgttgaaaaaaagatgatttagaattaaagggttgcttgtctgtgtcgcaaggcccttcaact

SEQ ID NO: 43106 - DNA, 201 bp, Homo sapiens
tcagccaaggatgccgtcatctgagggcttgactggggctggaagatctgcttccaagatggctcactcacatgagcattggcaggaggtctcaattcccygacatgtgggcctctccaataggctgcttgagtgtcattatgacatggcagccagcttcccccagagcaagtgatccaagagagaaataccgagatggaa

SEQ ID NO: 43107 - DNA, 201 bp, Homo sapiens
atcagaagttccctacgtgctcttcaaagctgattgcttgcagttaaaagaacccagaagaagcaggcacgccatgattttgaagctccgtttttgttctrttattcaactgcagtcaacttccaactgttgaaaaaaagatgatttagaattaaagggttgcttgtctgtgtcgcaaggcccttcaacttgttcacctgt

SEQ ID NO: 43108 - DNA, 201 bp, Homo sapiens
tactctggccttacctggagtgctgttccgtccacagcctgccagacaggttctagacctgcaccagatacacatgctgtctgctactagcttctttgagsctaagagagcaaagtcatgattcaggttcccttataggcttatgaatgtcacatagaagaaacccatctttccagttgtctggatgacaaaatacaagct

SEQ ID NO: 43109 - DNA, 201 bp, Homo sapiens
tagattgttgaatcattgcctccaacagccaactcttaccgtgacaaagtcagtagggctgatcttagaagtgtaggacttgtgagtgttacgtggttgtrctaactggtaccttagtggaggggcagataaggtaagtagaaacaatgcctgctttctcctccatgtctgggtcctacacatagtccccagtttgcctgg

SEQ ID NO: 43110 - DNA, 201 bp, Homo sapiens
tggactagaaccggaccaggtgacactgtggtgctttctaactctgagtttccagtaaaatccaaaattacatttggagaccaccaaagaatcaagattgrgctcattagtgcctcttcatcatgccccaagtctaggtggtcagcatgactaaatcttggtttctggcttctgccctgccttgcatgtctgagggacaat

SEQ ID NO: 43111 - DNA, 201 bp, Homo sapiens
ccatcagattcccagtcatcctagccatggttaccttcttctctaagttggcaggttagtgagcttaggctagcacttcagcatcaaatttagacttcatrataaagtaaatcacacagggaatagctgtcagcatggtgaccaccttgttgtccattcctactcagggactggcctgaagtgttttcacagcctgggtca

SEQ ID NO: 43112 - DNA, 201 bp, Homo sapiens
ggttagtgagcttaggctagcacttcagcatcaaatttagacttcataataaagtaaatcacacagggaatagctgtcagcatggtgaccaccttgttgtycattcctactcagggactggcctgaagtgttttcacagcctgggtcactgtgatgtcctggccctgtttgctcaaagtgttcatctcagagtgacttgtg

SEQ ID NO: 43113 - DNA, 201 bp, Homo sapiens
gacagagagaagaagaagaagagggaaagggaaggggagaagggagccttggtgacagagaaggcagatttcttggccactgactcgtcttttttcctttwtctgtctttcttcttgttttccatggtgacttttccacattttccttctgtgtttagactctattttctggaattgtctttgtaacataatcattaattt

SEQ ID NO: 43114 - DNA, 201 bp, Homo sapiens
ctcaaagtgttcatctcagagtgacttgtgaggtattgctgagcacataatggtcaagatagctgcataagcaggcgtggccccaaatgtagtcacctgamttcagaaaatcaatttggattctacagaaaggttctgttggattctgagtggaacctctttggatatgcctttggatttcaagattgagccaagtgttga

SEQ ID NO: 43115 - DNA, 201 bp, Homo sapiens
caagcattgtctgtgagatttacagtgtcagtcagggttctggcagggaccagatggttactcaaatggggcaacggaggagagtttaacaaaggcattaktttacaacagtgtgggcaaggctaagggaaaccaataagggatggaaaagcatctcctggaaggacccgtggggagctcccctttggcctgaaggaacag

SEQ ID NO: 43116 - DNA, 201 bp, Homo sapiens
tggtcaagatagctgcataagcaggcgtggccccaaatgtagtcacctgacttcagaaaatcaatttggattctacagaaaggttctgttggattctgagyggaacctctttggatatgcctttggatttcaagattgagccaagtgttgacatgggaagatgctccagttcctccagttatctcaaagaagctcattacc

SEQ ID NO: 43117 - DNA, 201 bp, Homo sapiens
cacacctgccgctttttatctaccctttagccaatatgtttccaaactcttgtttattcatttttaatattaataagaattggctgggagtggtggctcaygcctgtaatcccagtactttgggaggccaaggtgggtggaccacctgaggtcaggagtttgagaccagcctggccaacatggtgaaaccgcatctctact

SEQ ID NO: 43118 - DNA, 201 bp, Homo sapiens
ataagcaggcgtggccccaaatgtagtcacctgacttcagaaaatcaatttggattctacagaaaggttctgttggattctgagtggaacctctttggatrtgcctttggatttcaagattgagccaagtgttgacatgggaagatgctccagttcctccagttatctcaaagaagctcattaccttgctaagggtatgga

SEQ ID NO: 43119 - DNA, 201 bp, Homo sapiens
ttgcaattgccatattgccatggttttgccctttgtgttgactgtagcattgtgctgtttgaagacagagcagcatactgctttgtgtagtaaaaattgayggataatgtacttaaagcttttagatgtacactattcacattctaaatgacagatacaaaaaggaataatcagaatttagattgttgaatcattgcctcc

SEQ ID NO: 43120 - DNA, 201 bp, Homo sapiens
gttctaccttcatcagccacttctccctgagagtctcagcataaaatcttatgttctgctttaaagaaaagatcacaacttccctcaaaaatgtctcttcyatctccaaatccccatgttttcacctcctctcccttccttagtctgctctccaacctctctagccatggtccttgaacccatccctttctacttccttga

SEQ ID NO: 43121 - DNA, 201 bp, Homo sapiens
acactgtgcctggcatgagtataaataaaaagagcttcaactgcaattacattccatatatgggagaagctttcaacactggggcaagggagggacccagmctttcccaaatctcggctgaagtcacctcaggacaggcaaagactgatcagctccagaatagtccccttgttctcaaatgggcataatgtgacaaggaac

SEQ ID NO: 43122 - DNA, 201 bp, Homo sapiens
ttagtgactggggatgtggaactgaagcctccatacatcttcaacatgcccctaacccgcacagtttaaacattcatctgcttgaggctgcacgtagtgaygtctggaagacccattcacagctttggctaaatcttcctgctgttccttccccatctcatcctccaactccccacagactgaaacccaggccatgtaact

SEQ ID NO: 43123 - DNA, 201 bp, Homo sapiens
tgctttggatatatgcatttcatagaagcaaagaaagttggagctgggaggtgccccagtacacgcaattcaatggcttttagtcataagatcctttttttcaaagatagtttaaggagagaaacatctagcagaactgccctgggagaagaggtggggctggaggcctctgctcaggcagcttctgagcttaaaaatcac

SEQ ID NO: 43124 - DNA, 201 bp, Homo sapiens
tgctgctttggatatatgcatttcatagaagcaaagaaagttggagctgggaggtgccccagtacacgcaattcaatggcttttagtcataagatcctttytttcaaagatagtttaaggagagaaacatctagcagaactgccctgggagaagaggtggggctggaggcctctgctcaggcagcttctgagcttaaaaat

SEQ ID NO: 43125 - DNA, 201 bp, Homo sapiens
gtatacattttcttttttttttttttgagtaggagtctcgctctgtcacccaggctggagtgcagtggcgcgatctcggctcactgcaagctccgcctccygggttcccgccattctcctgcctcagcctcccgagtagctgggactacaggcacccactacggcgcccagctaattttttgtacttttagtagagacagg

SEQ ID NO: 43126 - DNA, 201 bp, Homo sapiens
acctccctgcattctgctaatgtaaatctgccttaaatgtcagtggaggagtaaccctgtaagctcagcaatgataaaatataaaaattaaaaaaaaaaaaccatgggaaaaatggatgaaaaaaccctttttttttaaattataaaactgatacatgcttattacaagagaaatgagaaaataaagaaaagtataaagaa

SEQ ID NO: 43127 - DNA, 201 bp, Homo sapiens
gctcccaccatcccaggggtgatgccaagtgattccaaatagtggagctcccaggtagctcaagaactgattctaacattcaaactgctttttttttttttaaattagttacctaaacggtcattatggagatgcagctgcccagaacaagccagaccaagtggccatgaggctgtcttctaactctggggtaatgtcctg

SEQ ID NO: 43128 - DNA, 201 bp, Homo sapiens
attgaagaggatttcagaaatccatttggcccaacctcttggaagatattatttctccatttatcagatgatgtggttgttaaacccagagaagtcagatrtcatgcacagatcacacagcaagcacccagggaacctaaactcctggtttctatctgctaataaaaccttttttgttgttttgttttttgagacagagtc

SEQ ID NO: 43129 - DNA, 201 bp, Homo sapiens
cgctcccaccatcccaggggtgatgccaagtgattccaaatagtggagctcccaggtagctcaagaactgattctaacattcaaactgctttttttttttttaaattagttacctaaacggtcattatggagatgcagctgcccagaacaagccagaccaagtggccatgaggctgtcttctaactctggggtaatgtcct

SEQ ID NO: 43130 - DNA, 201 bp, Homo sapiens
atattatttctccatttatcagatgatgtggttgttaaacccagagaagtcagatgtcatgcacagatcacacagcaagcacccagggaacctaaactccyggtttctatctgctaataaaaccttttttgttgttttgttttttgagacagagtctcactctgtcacccaggctggagtgcagtggcactatcttggctc

SEQ ID NO: 43131 - DNA, 201 bp, Homo sapiens
cgcttgaacccgggaggcagaggttgcagtgagccgagattgcgccattgcactccagtctgggtgacagggcaagactccatctcaaaaaaaaaaaaaaattaaattaacatataattatgaaatgttaaaaagcacagtgcagaaaataataatacattctgcgtgactctgaagccagactacctgggttcacatact

SEQ ID NO: 43132 - DNA, 201 bp, Homo sapiens
caaaaagttcaaggaatgatacataggcaccatttggggctcatttttgatactctgaatttaatgatagctaacatttttcagcttttttaaaacccaarcggatctgttctcagagagtgaattcaaaatcctttaaaggtgaacatgagcccacaccaggaaagtaagtattatttcattatcagtaacaaaatattt

SEQ ID NO: 43133 - DNA, 201 bp, Homo sapiens
tcgcttgaacccgggaggcagaggttgcagtgagccgagattgcgccattgcactccagtctgggtgacagggcaagactccatctcaaaaaaaaaaaaaaattaaattaacatataattatgaaatgttaaaaagcacagtgcagaaaataataatacattctgcgtgactctgaagccagactacctgggttcacatac

SEQ ID NO: 43134 - DNA, 201 bp, Homo sapiens
aaacccaaacggatctgttctcagagagtgaattcaaaatcctttaaaggtgaacatgagcccacaccaggaaagtaagtattatttcattatcagtaacraaatatttctcattggttgggtggatacagtgtacttgatagtgcattaactacctaccccaagataacctagatgattaggagtagagccaggattcaa

SEQ ID NO: 43135 - DNA, 201 bp, Homo sapiens
atcgcttgaacccgggaggcagaggttgcagtgagccgagattgcgccattgcactccagtctgggtgacagggcaagactccatctcaaaaaaaaaaaaaaattaaattaacatataattatgaaatgttaaaaagcacagtgcagaaaataataatacattctgcgtgactctgaagccagactacctgggttcacata

SEQ ID NO: 43136 - DNA, 201 bp, Homo sapiens
tctcaaactcctgtcctcaaggaatccttctgttttggcatcccaaagtgctgagattacaggcatgagccactgtgcctggactttttttctttttcttragagccagagcaaaattcaaattttatcagttttaattaattatattttaaaagtgggaatttggccaacaaagtatctttcctttctatacaagaaggg

SEQ ID NO: 43137 - DNA, 201 bp, Homo sapiens
accaggaaagtaagtattatttcattatcagtaacaaaatatttctcattggttgggtggatacagtgtacttgatagtgcattaactacctaccccaagrtaacctagatgattaggagtagagccaggattcaaacctaaacctatctaatccttcaatcattcatttgtttattcaataaaccaagtcattgtactag

SEQ ID NO: 43138 - DNA, 201 bp, Homo sapiens
tgaggcaggagaatcgcttgaacccgggaggcagaggttgcagtgagccgagattgcgccattgcactccagtctgggtgacagggcaagactccatctcraaaaaaaaaaaaaattaaattaacatataattatgaaatgttaaaaagcacagtgcagaaaataataatacattctgcgtgactctgaagccagactacc

SEQ ID NO: 43139 - DNA, 201 bp, Homo sapiens
catcccaaagtgctgagattacaggcatgagccactgtgcctggactttttttctttttcttgagagccagagcaaaattcaaattttatcagttttaatkaattatattttaaaagtgggaatttggccaacaaagtatctttcctttctatacaagaagggtatggcgtttggcaatgagctcctgaaaatgtaaagaa

SEQ ID NO: 43140 - DNA, 201 bp, Homo sapiens
gattacaggcgtgagccaccatgcctggccgacttcttgggtttgtcttggttctgtgtccttgggcaggttccttgacctatgtgtgcctccatttcccygcatgtaaagtgggaatcataatggtgccaaactcattgaggactgagtccatacatataaagcacttagaatggtaccaggctcataataagtactcag

SEQ ID NO: 43141 - DNA, 201 bp, Homo sapiens
cagagcaaaattcaaattttatcagttttaattaattatattttaaaagtgggaatttggccaacaaagtatctttcctttctatacaagaagggtatggmgtttggcaatgagctcctgaaaatgtaaagaaagcatgaggataactttgggactgatacttgggtcattaaaagtcttgcaaaactagaatttgttttc

SEQ ID NO: 43142 - DNA, 201 bp, Homo sapiens
tgactgctcagtcaacaggcaagttctcatggcatccctcagggccactgctcatgcttgagaaaagcctaactccaggcagtgcccttcacagactatgyaaataaccccctagagccatgctctgcacaaccttaacagcccagtggccctgcacccctcactcacctagtgcagacttctggcccatccctgagagag

SEQ ID NO: 43143 - DNA, 201 bp, Homo sapiens
actttatactaaatgttaccctctttaaatgatttaaaataatcctgcagtgatattctcctttctctccacctctctaaacagagcatctgtttaatttkggttctctaacattggcatgtgtctataaattaagatttttgtacaatgtctcacagatgcttttaccacatttagtttgtactcctttttttcttggac

SEQ ID NO: 43144 - DNA, 201 bp, Homo sapiens
gtcaacaggcaagttctcatggcatccctcagggccactgctcatgcttgagaaaagcctaactccaggcagtgcccttcacagactatgcaaataacccsctagagccatgctctgcacaaccttaacagcccagtggccctgcacccctcactcacctagtgcagacttctggcccatccctgagagagaaccaatcac

SEQ ID NO: 43145 - DNA, 201 bp, Homo sapiens
ccctcagggccactgctcatgcttgagaaaagcctaactccaggcagtgcccttcacagactatgcaaataaccccctagagccatgctctgcacaacctkaacagcccagtggccctgcacccctcactcacctagtgcagacttctggcccatccctgagagagaaccaatcacagtgtagcaggcaaggggagcctgt

SEQ ID NO: 43146 - DNA, 201 bp, Homo sapiens
gctcacccaacataatcattgtatgggcaagggaggctgccagcagctgtggtcaccctgggctggtgctccaggggagagggaatctcagttactctacytaaaacttgagattactacttctgaggaatcatcccaaaagttcacaaatcaggaagagatatctgaatgggtgctttaaattttgtttaaaaaagagaa

SEQ ID NO: 43147 - DNA, 201 bp, Homo sapiens
tggcagctcttaagttattacagtatcagagcttcagaaaatgctctgctaaagacaattttgtgctcagaactaagctaaagacacacagcctcagcagycgcaaggtttgtattattctaaattggttccaagggaaatttcctggagaaagtgatttgtgggtggtgcctcagctacaggatttccctggccgggggt

SEQ ID NO: 43148 - DNA, 201 bp, Homo sapiens
tctcctaagggaggttgataagtatttggccattaactgtagactaatgtcatcctcaaaatttaataaatgaaaaatgtaacactctctttttttttttyccccattccttgctgttattctactgattgtgttaacatagtgtggattgaggttgggtcagcttgtggttgagcttcctgccttcctgtttgtaactga

SEQ ID NO: 43149 - DNA, 201 bp, Homo sapiens
ataggcaatgattacagttttacctcaaaaaaggatggccttgaagtcttaaatcaaattattttcatagcagatgaccctcaagagaaggctatgcatartgagacttgtggaaatacagctgtgaccatacccctgggtaaaattactgaaaatgctgccaacaaaaaagacgagaaagagaaacaatgcactgcagct

SEQ ID NO: 43150 - DNA, 201 bp, Homo sapiens
tttccagttctgtcaattcagattggagaattggacactgcaggtttcatatccgtcatatagttgagatgtctagaaagaccatagtccattttgaccarctctccagcactagcgtgtttctgagctttatgtgttgggaacaaaggaaagaccccacaaggtgaatcactctggaatttaaactgttcaattagccag

SEQ ID NO: 43151 - DNA, 201 bp, Homo sapiens
tgcctttggatttcaagattgagccaagtgttgacatgggaagatgctccagttcctccagttatctcaaagaagctcattaccttgctaagggtatggaytgtccttttccagaaaaaatcctcttgatattttgcatgcacacatgcaaaaaataataacaacagaagctgttttcctgtatgtaatgagagtgttcct

SEQ ID NO: 43152 - DNA, 201 bp, Homo sapiens
ttcagattggagaattggacactgcaggtttcatatccgtcatatagttgagatgtctagaaagaccatagtccattttgaccagctctccagcactagcrtgtttctgagctttatgtgttgggaacaaaggaaagaccccacaaggtgaatcactctggaatttaaactgttcaattagccagtggtgagtagaaaacc

SEQ ID NO: 43153 - DNA, 201 bp, Homo sapiens
aattagccgggcgtggtggcgggcgcctgtaatcccagctacttgggaggctgaggcaggagaatcgcttgaacccgggaggcagaggttgcagtgagccragattgcgccattgcactccagtctgggtgacagggcaagactccatctcaaaaaaaaaaaaaaattaaattaacatataattatgaaatgttaaaaagc

SEQ ID NO: 43154 - DNA, 201 bp, Homo sapiens
ccccgtttctactaaagatacaaaaaattagccgggcgtggtggcgggcgcctgtaatcccagctacttgggaggctgaggcaggagaatcgcttgaaccygggaggcagaggttgcagtgagccgagattgcgccattgcactccagtctgggtgacagggcaagactccatctcaaaaaaaaaaaaaaattaaattaac

SEQ ID NO: 43155 - DNA, 201 bp, Homo sapiens
acgcaccaccatgcccggataatttttgtatttttaatagagatggggtttcaccatgttggtcaggccggtcttgaactaatgacctaaaatgatctgcycacttcggcctcccaaagtgctgggattataggcatgagccactgtgcctggcctttggctaagtactctaagccacagtctcttttctcaatggaataa

SEQ ID NO: 43156 - DNA, 201 bp, Homo sapiens
atgctagagtgcagtggtgtgatctcagctcactgcaacttccactccccaagttcaagtgattctcctgcctcagcctcccaagtagctggagttacagrtgtgcaccaccgtgcctggctaatttttgtatttttagtagagacggggtttcaccatgttggctgggctggtcttgaactcctgacttcagggtgatcc

SEQ ID NO: 43157 - DNA, 201 bp, Homo sapiens
actgggtctgttccagtgacactgtgatcagagttgccaacagtttcctatttcaaatcactaactcgaatccccaggccactttcaaatgtttccatacrcatgcgctgtatccctgaataccctctcagtggttatggccccccaatccccatcaatggcctctaagagctgttctttttttctctttctctgcggcag

SEQ ID NO: 43158 - DNA, 201 bp, Homo sapiens
ataagggatggaaaagcatctcctggaaggacccgtggggagctcccctttggcctgaaggaacagaggaaaagcaggtcctagagcctaaagagagcagytgtcactgtgggactagctgacaagccctgtggcttttggtggagggacagagtcaactccatgacggcacaggtgaggaagaaaagactcccatctcat

SEQ ID NO: 43159 - DNA, 201 bp, Homo sapiens
cagcacaatcttggttcattgcagccttgacctctggggctcaaatgatcctcccacctcatcctcccgagtagctgggattacaggtgcatgccaccacmcctagataattttttttttttgtagatgtggggtctcactttgttgctgaggatggtcttgaactcctggcttcaagtgatccccccgctttggcctccc

SEQ ID NO: 43160 - DNA, 201 bp, Homo sapiens
actcgaatccccaggccactttcaaatgtttccatacgcatgcgctgtatccctgaataccctctcagtggttatggccccccaatccccatcaatggcckctaagagctgttctttttttctctttctctgcggcagggaaacagcccagctggcggctgacctcaccctctgattcatgctcatcagtcacgtgctggt

SEQ ID NO: 43161 - DNA, 201 bp, Homo sapiens
tagaaaaagaaaacagcaggtgcaatggcacaggggtgaggaagtgctgccagtgtgaggagctgtgggcactgtgatttaccatacggcacttgggagcrcgtggtgacatgggggtgggggaggagacaggggaggtggacaggggtacttcatgaaggcctttaagccatgcctgaggctgagtaattgggcagcatt

SEQ ID NO: 43162 - DNA, 201 bp, Homo sapiens
gggttctctaacattggcatgtgtctataaattaagatttttgtacaatgtctcacagatgcttttaccacatttagtttgtactcctttttttcttggaygacttagttcaaaaaaatttattttggtcaaacatatgattttagcttttgaggttacctaataaatcaccagcttatagactcataaaaatttggttgg

SEQ ID NO: 43163 - DNA, 201 bp, Homo sapiens
aacagaaatagaccaagaggaaaacaggaatactccccaaattccaccttgtaatgtttaataatgagagaacccaaagaacagaaacagcagttagtttrtgtaattaaaatgtgtggacttttcctctgtagattttaaactcggctttggatcatgccctaaggacagcaaccattttgaaagaaactacagatcaaa

SEQ ID NO: 43164 - DNA, 201 bp, Homo sapiens
tctgtgtcgcaaggcccttcaacttgttcacctgtgatatccagagactccaagatgttggtgagtttctattgcaattgccatattgccatggttttgcmctttgtgttgactgtagcattgtgctgtttgaagacagagcagcatactgctttgtgtagtaaaaattgatggataatgtacttaaagcttttagatgta

SEQ ID NO: 43165 - DNA, 201 bp, Homo sapiens
cactttgggaggctgaggaggaggatcgcttgaacccaggagttcgagatgagcctgggcaacctagcatgatcctgtctctacaaaaaaaaaaaaaaaaraaaaaaagaaaaaaaaaattagccaggtgtggtggtatatgcctgtggtcccagctactcgggaggctgagacaggaggattgcttgaacccaggaggta

SEQ ID NO: 43166 - DNA, 201 bp, Homo sapiens
gggaacaaaggaaagaccccacaaggtgaatcactctggaatttaaactgttcaattagccagtggtgagtagaaaaccatcactatcttgacacacagtktggaacttaatgcatcctctgttattctctagagtgtggctaccatgagttttgtgttagtgacagcaccagcaacagagctggtgacaagaccagccat

SEQ ID NO: 43167 - DNA, 201 bp, Homo sapiens
caaaggtaatcatctttttatacgtttaagtgccatgtatatttgtatatcttttttctcttaattcatgtcctttgttctttggggtcatttttttttttattgatttgagtgatctttattctaaaatacttggaaaaatacaagaaagcatgacaaggggtcctgattaaattctcccctgccttcaccagcacattg

SEQ ID NO: 43168 - DNA, 201 bp, Homo sapiens
cagctttctgttttcagtacttaataaaactgtgataagttgagatgaatggtagcccaaatgtgttctttcttgtataggaatagaatctgaggcaagtstctctaagttgtcaccaacctctcagaaaggcacttcctcaagttcttcttacatatttcaaaagatatcccaagggaaacagatgtgtcagaagttgaa

SEQ ID NO: 43169 - DNA, 201 bp, Homo sapiens
agttataaagggtgggcctgtccgcagttgatgggtactggtgaattcaggttataagaattgccattacctggaaattaaatatgactttgaatactcayaaaatcaaccttgaagcaatgtttttcaggtcaaaatcttttcctttcatatccttgctagttgctgcatttaatcaaaccattaatttatgtcatcacc

SEQ ID NO: 43170 - DNA, 201 bp, Homo sapiens
gaagggtaaggctgggagaaccagaagtatgctgacctgacattgaagatgtagttgaggccattggctcatcaacaagggataaggtcagaagttctgaygtaggcacaagcaaggtttagggagggctgtgcttcagaaacctagcagcatggacaaaaaccaggggacccaaatgctaaaagacacagttgattattc

SEQ ID NO: 43171 - DNA, 201 bp, Homo sapiens
ccaaggggtattctagaaaaagaaaacagcaggtgcaatggcacaggggtgaggaagtgctgccagtgtgaggagctgtgggcactgtgatttaccatacrgcacttgggagcgcgtggtgacatgggggtgggggaggagacaggggaggtggacaggggtacttcatgaaggcctttaagccatgcctgaggctgagta

SEQ ID NO: 43172 - DNA, 201 bp, Homo sapiens
ctgaacgaaggctggcaatgaggctggagatggggacaaatctgggggtttagggaaatggtggcagatggaaagggctgaagagaggaagggaagaggcytggatgagctccagatttctggcttgggtaaccaaggtcaggaataaaagtagaggatcccgtttagaatgggtgtggaaggcaagcaggaggcaagacg

SEQ ID NO: 43173 - DNA, 201 bp, Homo sapiens
caaaatcttttcctttcatatccttgctagttgctgcatttaatcaaaccattaatttatgtcatcaccacagcagtcatgttgtcagtgccaggatcaakggaagggggtggagcaatggggtgaagggtaaggctgggagaaccagaagtatgctgacctgacattgaagatgtagttgaggccattggctcatcaaca

SEQ ID NO: 43174 - DNA, 201 bp, Homo sapiens
ggagagtaaaggtggctcctgacattatcagcctgtggtctgggacttccaggcccaggtggttcagtcttgaaaaaagccagacagggctacaagcaacygcctcagcctgagcagcactacacagcagaaagcatttggattttggagcggatgtcgtgcctctacttattggttacacaactgtagacatgttacagc

SEQ ID NO: 43175 - DNA, 201 bp, Homo sapiens
tggagcggatgtcgtgcctctacttattggttacacaactgtagacatgttacagcatgtcttccctttcagagttgttatgagaattcagtgaggcacayttctgcctaggaaattgtgccctatcttctgcaacataatgcaatttaaattccaagatcctgaattataatttgtgattagcttttatctcttttctca

SEQ ID NO: 43176 - DNA, 201 bp, Homo sapiens
aatttgtgattagcttttatctcttttctcattaccctctttcccttgaacacataattcttcctcatggcctcagctgccatcttcaggcttccagttcstaagtgacttgtcctgacttctcatctatagctccaaatgtttgtgtctctcttcacttcggacatcccaccctcactgcaaactctaccttgtccaaca

SEQ ID NO: 43177 - DNA, 201 bp, Homo sapiens
tgttgcatgttgtatttatttatttgcaaaatgtaaagaattaataggctgggcatgggggctcatgcctgtaattccagcactttgggaggctgaggcgkgtggatcacttgagctcaggagttcaagaccagcctggccaacatggtgacattccatctgtacaaaaaaaatacaaaaattagccaggtgtggtggctc

SEQ ID NO: 43178 - DNA, 201 bp, Homo sapiens
tttaccttcaaatatatttatttacagattgagttttaaaattgtcttaaagttcttgtagagattatgtcttttttgttttgagacggagtttcactctrtcgccaggctggagtgcagtggcgcgatcttggctcactgcaacctctgcctcccgggttcaagtgattctcctgcctcagcctcctgactagctgggac

SEQ ID NO: 43179 - DNA, 201 bp, Homo sapiens
acgcccagctaattttttgtatttttagtagagacggggtttcaccatgttggccaggatggcctccatctcttgacctcgtgatccacctgcctcggcckcccaaagtgctgggattacaggcatgagccaccttgcttggacgagattatgttttacatatgcaattccttcctttatcctttaaatatccccacggat

SEQ ID NO: 43180 - DNA, 201 bp, Homo sapiens
tatttgaagacacagcctggggctgatattcaaacttgaatgaggattttgtcaaagcgaaggacaaagtgacaaagattatgtcaaggttagcccttccraagaagtgtttgcctcctcaaagcacttacttgcctggcaaaatctcactcattcaaggcccagctctagcgtcaggtcatttatgcatccctagtcagc

SEQ ID NO: 43181 - DNA, 201 bp, Homo sapiens
tcaaaatcttttcctttcatatccttgctagttgctgcatttaatcaaaccattaatttatgtcatcaccacagcagtcatgttgtcagtgccaggatcawtggaagggggtggagcaatggggtgaagggtaaggctgggagaaccagaagtatgctgacctgacattgaagatgtagttgaggccattggctcatcaac

SEQ ID NO: 43182 - DNA, 201 bp, Homo sapiens
actcttgtttattcatttttaatattaataagaattggctgggagtggtggctcatgcctgtaatcccagtactttgggaggccaaggtgggtggaccacytgaggtcaggagtttgagaccagcctggccaacatggtgaaaccgcatctctactaaaaatacaaaaattagccaggcatggtggtgcacacctgtaatc

SEQ ID NO: 43183 - DNA, 201 bp, Homo sapiens
ttgtttattcatttttaatattaataagaattggctgggagtggtggctcatgcctgtaatcccagtactttgggaggccaaggtgggtggaccacctgakgtcaggagtttgagaccagcctggccaacatggtgaaaccgcatctctactaaaaatacaaaaattagccaggcatggtggtgcacacctgtaatctcag

SEQ ID NO: 43184 - DNA, 201 bp, Homo sapiens
ttaatctgacaccacgggaggttcaagagaagaacccataatcagttataaagggtgggcctgtccgcagttgatgggtactggtgaattcaggttataaraattgccattacctggaaattaaatatgactttgaatactcataaaatcaaccttgaagcaatgtttttcaggtcaaaatcttttcctttcatatccttg

SEQ ID NO: 43185 - DNA, 201 bp, Homo sapiens
ggggatctattacttatggctattactccttgccaggttactcataattaatctgacaccacgggaggttcaagagaagaacccataatcagttataaagrgtgggcctgtccgcagttgatgggtactggtgaattcaggttataagaattgccattacctggaaattaaatatgactttgaatactcataaaatcaacc

SEQ ID NO: 43186 - DNA, 201 bp, Homo sapiens
ggaaacagatgtgtcagaagttgaaagaacagactgatcaactgaagactaaagtaatacttttaaagcttattataaacaatataagtaaccaaattcayacatgagaaaccatgccattaatgagagattgtaattttttcactgcaggtacaagaattttccaaaagaataaaacaggactctccttaccatttgcaa

SEQ ID NO: 43187 - DNA, 201 bp, Homo sapiens
actacatttacaacattgatgtgttgattaaataagatgaggaatggaaaaatgctttgtaagctaaaaaccattctgcaaatatacaggattatgaatgycccactaaggaaggccagaggcctctgagtgggttctgagagagaaatcagaagtaattgtacttttgagctgtgtgctgtgagggtttgtgaatgttga

SEQ ID NO: 43188 - DNA, 201 bp, Homo sapiens
gctggacattgactcagatggaacacccaaaatgaacaaatgcttcctggggcagaggcattgtaccaaaattttgcaatttgttgaatatcattataatkggtttggagacccagaggagcctaagaaaaccctagaaaggctcacatgataaccacagagggccctcttctcaagttcctcctctcctctccctctcag

SEQ ID NO: 43189 - DNA, 201 bp, Homo sapiens
cctcccaggatcaagtgattattgtgcctcagcctcccgagcagctgggaccacaggtgcatgccaccatgccccatgcctggctaattttttttttttttgtatttttagtagagacaggatttcaccatgttggccaggctggtctcaaacttttgtcctcaagtgatctgcccgccttttcctcccaaagagctggaa

SEQ ID NO: 43190 - DNA, 201 bp, Homo sapiens
ccaggactcaaggagaggattctttccctataatttcctggtataaattaaaagaaactatttagtaggcttaatatttgtgagtttagccctttctattsatagcattttaatatggaattgttgttgccaaattttttaatggtttacatttcagccctagcgttctgtggcatttttttccccaaggtatggttttac

SEQ ID NO: 43191 - DNA, 201 bp, Homo sapiens
tgtcctagctctgttcctctgagcttggttatctttttttttttttttttttttttgagacagggtctcactctgttacccaggctggagtgcagtggcaygctcttagctcactgcaacctctgcctcccaggatcaagtgattattgtgcctcagcctcccgagcagctgggaccacaggtgcatgccaccatgcccca

SEQ ID NO: 43192 - DNA, 201 bp, Homo sapiens
gagtttagccctttctattcatagcattttaatatggaattgttgttgccaaattttttaatggtttacatttcagccctagcgttctgtggcattttttyccccaaggtatggttttacttttccaaaattaatggaacctctgtctacctttatttcagcactgagtaattagacagtaaggatgaggttttaatattg

SEQ ID NO: 43193 - DNA, 201 bp, Homo sapiens
gaagcacattggctttggatgacctgtcctagctctgttcctctgagcttggttatctttttttttttttttttttttttgagacagggtctcactctgtyacccaggctggagtgcagtggcatgctcttagctcactgcaacctctgcctcccaggatcaagtgattattgtgcctcagcctcccgagcagctgggacc

SEQ ID NO: 43194 - DNA, 201 bp, Homo sapiens
ataaccaatcttattaaaaacaacaacaacactgatgagtctgactgcttctatttcttcttcctgtttgtgacatgtggtcttacaggagtagaagcacrttggctttggatgacctgtcctagctctgttcctctgagcttggttatctttttttttttttttttttttttgagacagggtctcactctgttacccagg

SEQ ID NO: 43195 - DNA, 201 bp, Homo sapiens
ttgtagcctaaaagcaataggctatacgatacagcctaggtgtgtagcaggccataccatctagtttctgtaagtacactctatgatgcatttctcagaaygtgtatctggtgttaagtgacacataactgtattttgagattcatccatgtattacagttgcatgtatcaatagttatcatttttaattttttttaaact

SEQ ID NO: 43196 - DNA, 201 bp, Homo sapiens
atagttatcatttttaattttttttaaactttccagttttgaaggtatgccctcctgctgtatctcaataaattacaattgttccacgggataaaaaagcytcacatcaagagggactttggggtagtagtaccccctggagatacaataaatgctgcttggggatgaaatgatgaggcatagatcctagttttctaagaa

SEQ ID NO: 43197 - DNA, 201 bp, Homo sapiens
gattctcctgtcaagcctccagaaggaatgcagccctgcctacacctttatttcagtccagtgaaattattttcagacgttgacctccagaacttaatcartttgtgtagttttacactacatttgtgataactttgtgaaataaaatttatgagaggtcattggttgactgagctcctgcactaggccccaacagaccag

SEQ ID NO: 43198 - DNA, 201 bp, Homo sapiens
ctttgtgaaataaaatttatgagaggtcattggttgactgagctcctgcactaggccccaacagaccagaccaaactagaatggagtcacttgtgctaggrgccacataaccaaactgaacttagaaatgggtcagttttccaaaaaacaggaaattcatagcaaccaacctaatggggcccagtcaacttgatcaggcat

SEQ ID NO: 43199 - DNA, 201 bp, Homo sapiens
tataaataaaaagagcttcaactgcaattacattccatatatgggagaagctttcaacactggggcaagggagggacccagcctttcccaaatctcggctraagtcacctcaggacaggcaaagactgatcagctccagaatagtccccttgttctcaaatgggcataatgtgacaaggaacagaatcccatacaaccctt

SEQ ID NO: 43200 - DNA, 201 bp, Homo sapiens
agttattacagtatcagagcttcagaaaatgctctgctaaagacaattttgtgctcagaactaagctaaagacacacagcctcagcagtcgcaaggtttgyattattctaaattggttccaagggaaatttcctggagaaagtgatttgtgggtggtgcctcagctacaggatttccctggccgggggttgaaggcactgg

SEQ ID NO: 43201 - DNA, 201 bp, Homo sapiens
ctagaagttttcctcagagtactgctttaactgcattacattggttttcctatgttattctctcatttgtcattgacttgtaagttatgcctaacattcakttttatttcctacttaatccaaagctatttaggtattaaaatttctaattaaacagggttttttttgggggggggctatctttttgttgttaatgtctag

SEQ ID NO: 43202 - DNA, 201 bp, Homo sapiens
tatgcaaataaccccctagagccatgctctgcacaaccttaacagcccagtggccctgcacccctcactcacctagtgcagacttctggcccatccctgakagagaaccaatcacagtgtagcaggcaaggggagcctgtttacttcaaaaggagctgcttttattttttgactgcttctgcctccttggggtgaaagctc

SEQ ID NO: 43203 - DNA, 201 bp, Homo sapiens
gttaccctggatgacttggcctccaccttctcttcactctcaaatgaggtaatacagcaatgtacagtctaattttgtgccaggaaaaatggtgtttttgcatttatagactcctaattcatggattcactgaattccatttttaatatctcatgaaaatttaactttccaaagtcccatgaattatattattttaaatgg

SEQ ID NO: 43204 - DNA, 201 bp, Homo sapiens
ctcaggtgggagtgaggtaacagggacaccccaaggagggccgcaggaggcccccaacgaggagctctgtgagctggccccgcagacgtgagtcctagccytggagccccagcagacacaggacacagaaagaggccccttcctcatgcagcctccaggaaggcccatgaggctcccacaggaaaagcagtcttggaccac

SEQ ID NO: 43205 - DNA, 201 bp, Homo sapiens
ttggcatcatggctccggctcttgactgcaaacctgggctccctctatgatgacagaacatgttgggtcattctgaacggtggtgtcattgatcaatatcracagtaacgttttcttaccctttaattgtgcagatggagcccatagtacatatccaccaagaacttctcacaggtactaatgttttaaaacttctttgag

SEQ ID NO: 43206 - DNA, 201 bp, Homo sapiens
gttacaaagcctggtagcctggctcctcacctgccccaccagcagggcctggccagcctctgcaaccctctgggcagagatctgagggacgggacagctgrggctgggggacgcggggagaggtgaaggtcaagtggccgcatgaggcccatagcactctctgccttaggttgctcgctcccaccatcccaggggtgatgc

SEQ ID NO: 43207 - DNA, 201 bp, Homo sapiens
agaataaaattgaagcccattgttagaatacgtagggattagaggatagaatatgtgtgaaaggaaacttagtgaagctcagatatattgttcccttgctytgaacaaggctgacacaacaggaggcaggcccccagagagcgagaggtaggaagagcattctaagatcagctgcaagcctggaaggcaggggtagctttc

SEQ ID NO: 43208 - DNA, 201 bp, Homo sapiens
aatagatgtgatattcatttgtctgatttattcaaatatattttatattcgtatagtagaatggtctatttttaatacctgttatgattttgttttttagraaatatacgaagagtcatcaacttggaaaggaaacaaagagtgcttttgggcatccaacagttaatcacttatgtttttagagcatgcaatcttaacttt

SEQ ID NO: 43209 - DNA, 201 bp, Homo sapiens
tatatctatgtaatatctctaattgcagctgaagcgatttgaggtctatcatagcgttgatactttgagtcatattttttcccctttagattggctgatgytagaaatcagataatatttgctgttcgtcaagaatatgtcgagcttggagatcagctcctcgtgcttcagcctggagacgaaattgccgttatccccccc

SEQ ID NO: 43210 - DNA, 201 bp, Homo sapiens
gttttctttttcttttttttcatttttaaagggactacaagaaataactttgaagggaaaaaagtcattagcttagaatatgaagcatatctacccatggyggaaaatgaagtcagaaagatttgtagtgacattaggcagaaatggccagtcaaacacatagcagtgttccatagacttgggtatgatttcctttatcac

SEQ ID NO: 43211 - DNA, 201 bp, Homo sapiens
aacgtgctatttcttttgtagggaaaaaccttattttaattgttttctttttcttttttttcatttttaaagggactacaagaaataactttgaagggaaraaagtcattagcttagaatatgaagcatatctacccatggcggaaaatgaagtcagaaagatttgtagtgacattaggcagaaatggccagtcaaacaca

SEQ ID NO: 43212 - DNA, 201 bp, Homo sapiens
tgaggtctatcatagcgttgatactttgagtcatattttttcccctttagattggctgatgttagaaatcagataatatttgctgttcgtcaagaatatgkcgagcttggagatcagctcctcgtgcttcagcctggagacgaaattgccgttatcccccccattagtggaggatagtgcttttgagccatctaggtatgt

SEQ ID NO: 43213 - DNA, 201 bp, Homo sapiens
cttagaatatgaagcatatctacccatggcggaaaatgaagtcagaaagatttgtagtgacattaggcagaaatggccagtcaaacacatagcagtgttcyatagacttgggtatgatttcctttatcactctaaaagttaagtgtaattgttttccatctttgtactaactctgattcttgaatctttcttagtaattct

SEQ ID NO: 43214 - DNA, 201 bp, Homo sapiens
ctcttttctaactgtatgtttacgtaaaatagaactacagtataattctaagactgcatacctggattttttttcatctgtctagcagattctttaacacrtagattcagagatgatggtgatttttttttctcttcatcttgttaaagcttggttccagtgtcagaagcaagcataatcattgctgtgtcctcagcccac

SEQ ID NO: 43215 - DNA, 201 bp, Homo sapiens
ctagattttccaaaattgaaggtaaaaatgtacttgatagtcctgggaacataaatattttccttttaagtatctattagtcagaagaggaatattgcccrgtttgccaggtgagtgtttttagtaagcttgcttaatcagtgctcatctttgtgaagatctgttttattttcctaatcaaattttgtttttagaagattt

SEQ ID NO: 43216 - DNA, 201 bp, Homo sapiens
tactgcctctgctgaatgctactgcaattaattactcttttctaactgtatgtttacgtaaaatagaactacagtataattctaagactgcatacctggattttttttcatctgtctagcagattctttaacacgtagattcagagatgatggtgatttttttttctcttcatcttgttaaagcttggttccagtgtcaga

SEQ ID NO: 43217 - DNA, 201 bp, Homo sapiens
gcagctgtggaaggagatagaaactcgacatcctgggtagttaaaaatttgtagaatgcatatgagtaacacttagatattttcaaaatacataaatgatmaaagtaaaaaggttaatttcgatttccgtgcttaatgtcaaaaagaatcgttagttgtattttttttggaacacctgaaaaactctaaatgtgcaccgta

SEQ ID NO: 43218 - DNA, 201 bp, Homo sapiens
gaacataaatattttccttttaagtatctattagtcagaagaggaatattgcccggtttgccaggtgagtgtttttagtaagcttgcttaatcagtgctcrtctttgtgaagatctgttttattttcctaatcaaattttgtttttagaagatttcaaagtagttttagaagaattggtatgctgcttgtttactattaat

SEQ ID NO: 43219 - DNA, 201 bp, Homo sapiens
tgtctagaattgtctagaattgcctacagcgttgtggttgacagaaagctgaggagttaatgaacagctcagtagatgaaaagaccagagcagagagccarggcttttaaagggcacttctcccctccttcccaggggacctgcctcagtcagtggtagaaataagcaagttggactcataaccagggcctgggaaatttg

SEQ ID NO: 43220 - DNA, 201 bp, Homo sapiens
ttttcttcacgtcctcgccagcatctgttattttaataatagctcttctgactggtgtgagatggtatctcattgtggttgggatttgcatttctctaatratcagtgatgttgagctttcttttcatatgattgttggccacatgtatgtcttcttttgaaaagttcctgttcatgtcctttgcctacttttattggggt

SEQ ID NO: 43221 - DNA, 201 bp, Homo sapiens
tgttttttaggaaatatacgaagagtcatcaacttggaaaggaaacaaagagtgcttttgggcatccaacagttaatcacttatgtttttagagcatgcartcttaactttgttaaactattattattgatcacattttgatttttttctctccacatcaggatagtttactgaagcacaatctcttatactagtgggaca

SEQ ID NO: 43222 - DNA, 201 bp, Homo sapiens
tattattattgatcacattttgatttttttctctccacatcaggatagtttactgaagcacaatctcttatactagtgggacaaaagggagaaaaaggaarcaagataaatgggtatgtaggatgaagggttatttaaaatggaactaaagatagaaggaggactgtaggaagaaatggaataatttaaatgtgaggaaag

SEQ ID NO: 43223 - DNA, 201 bp, Homo sapiens
tcactccccattaagctgcatcattaccttttttttctttttttttttttgagatggggtatcactttgtcgcccagactggagtgcagtggcatgatcartttcagctcactgcaacctccacctcccaagctcaagcaattctcctgcctcagcctcccaagtagttgggattatagatgtgtgccactaccgcctggc

SEQ ID NO: 43224 - DNA, 201 bp, Homo sapiens
ttgttattaaaagcattttctttactttcaggttgaagtattgtattttgcaaaaagtgctgaaataacaggagttcgttcagagaccatttctgtgcctyaagaaataaaagcgttgcagctgtggaaggagatagaaactcgacatcctgggtagttaaaaatttgtagaatgcatatgagtaacacttagatattttc

SEQ ID NO: 43225 - DNA, 201 bp, Homo sapiens
cggtcccgctgtcctaggcgggatggtgccgctgtgccaggtaagggtggcgggtgtgcgtgcgggcctgggtgcggagccctcctcgacgtgtctctccygccctttccctccacatacccagccttggtcagtcggacctccccactagcccccaacctggccggcgtcttgggttcgggggcgcccccgcccccgccc

SEQ ID NO: 43226 - DNA, 201 bp, Homo sapiens
ttttttttttttgagatggggtatcactttgtcgcccagactggagtgcagtggcatgatcaatttcagctcactgcaacctccacctcccaagctcaagyaattctcctgcctcagcctcccaagtagttgggattatagatgtgtgccactaccgcctggctaatttttgtatttttagtagagacggggtttcaccat

SEQ ID NO: 43227 - DNA, 201 bp, Homo sapiens
aggagggtttagtggatagattctaacaaattagctgtagcatcagcctcatctactgcctctgctgaatgctactgcaattaattactcttttctaactrtatgtttacgtaaaatagaactacagtataattctaagactgcatacctggattttttttcatctgtctagcagattctttaacacgtagattcagagat

SEQ ID NO: 43228 - DNA, 201 bp, Homo sapiens
ctatttagaaactgtggtcaccatatcaccaccatgatttcaggaggttctaaaaatgcagttttttggaatttcgaatttattcagaaaactataggctrccattaaagggatatttgtggtaattacagctgttctttgaaaaggttacgaagattactcaaaagcattgtgtgttacttgaatgtgtttcgcaggact

SEQ ID NO: 43229 - DNA, 201 bp, Homo sapiens
aggccgagggagtgctccccaaaggaactccccaaggtatcttagaagcatcctgggccactgtccttgatttgactcatgtaaactatattttgtgccayagcctcttccttttacatcgacataatgtagaaaaaaatataaattgaaagagcctataagttgttgagtgttttacccctaggacttctgttaaggttt

SEQ ID NO: 43230 - DNA, 201 bp, Homo sapiens
ttctaattgtaactcaacacacattgaggtatgggccctcctcagtgactttaactagctcagaaacgtactcccccaccaaccccacctcaccgcccccyatcccggttctgggagagcattgttattaaggatgcatgacaggaatgttggcagaactggaaagtattaaaaaagcattatcagacagtcttgatatta

SEQ ID NO: 43231 - DNA, 201 bp, Homo sapiens
tgctcatctttgtgaagatctgttttattttcctaatcaaattttgtttttagaagatttcaaagtagttttagaagaattggtatgctgcttgtttactrttaatttactattaaaaatattccttttttattaacgtgctatttcttttgtagggaaaaaccttattttaattgttttctttttcttttttttcatttt

SEQ ID NO: 43232 - DNA, 201 bp, Homo sapiens
actattaaaaatattccttttttattaacgtgctatttcttttgtagggaaaaaccttattttaattgttttctttttcttttttttcatttttaaagggrctacaagaaataactttgaagggaaaaaagtcattagcttagaatatgaagcatatctacccatggcggaaaatgaagtcagaaagatttgtagtgacat

SEQ ID NO: 43233 - DNA, 201 bp, Homo sapiens
aatgtagaaaaaaatataaattgaaagagcctataagttgttgagtgttttacccctaggacttctgttaaggtttgttaatgtattatttctaggaaagrtatggatgaagttgaagagaaatctaaagatgttataaactttactgccgagaaactttcagtagatgaagtctcacagttggtgatttctccgctctgt

SEQ ID NO: 43234 - DNA, 201 bp, Homo sapiens
gtgttttacccctaggacttctgttaaggtttgttaatgtattatttctaggaaagatatggatgaagttgaagagaaatctaaagatgttataaactttrctgccgagaaactttcagtagatgaagtctcacagttggtgatttctccgctctgtggtgcaatatccctatttgtaggtgagttgtaattttcattgca

SEQ ID NO: 43235 - DNA, 201 bp, Homo sapiens
agaaatgttgaagtagtaggtatgtttggaaagaaaaaaaaatgtttaaaactaaagactttctgtcttcccctatgtaaccttgcccatgatgtctctcrtcatgattgttaaaagaggagccattgaaatagatgtgatattcatttgtctgatttattcaaatatattttatattcgtatagtagaatggtctatttt

SEQ ID NO: 43236 - DNA, 201 bp, Homo sapiens
aatgaagaatcaatctgtaaaacagattgcctctcatgtcaacactaggcttctttctcaggcctactatctggaaataatagaagaatctcttgtcagayatgtatctcaatgctatttagaaactgtggtcaccatatcaccaccatgatttcaggaggttctaaaaatgcagttttttggaatttcgaatttattcag

SEQ ID NO: 43237 - DNA, 201 bp, Homo sapiens
actagctcagaaacgtactcccccaccaaccccacctcaccgccccccatcccggttctgggagagcattgttattaaggatgcatgacaggaatgttggmagaactggaaagtattaaaaaagcattatcagacagtcttgatattatacattttcagaaatatattaaaaataataaactaaaacccatgatttcaaaa

SEQ ID NO: 43238 - DNA, 201 bp, Homo sapiens
gaatggtctatttttaatacctgttatgattttgttttttaggaaatatacgaagagtcatcaacttggaaaggaaacaaagagtgcttttgggcatccarcagttaatcacttatgtttttagagcatgcaatcttaactttgttaaactattattattgatcacattttgatttttttctctccacatcaggatagttt

SEQ ID NO: 43239 - DNA, 201 bp, Homo sapiens
ctgtgcctcaagaaataaaagcgttgcagctgtggaaggagatagaaactcgacatcctgggtagttaaaaatttgtagaatgcatatgagtaacacttaratattttcaaaatacataaatgataaaagtaaaaaggttaatttcgatttccgtgcttaatgtcaaaaagaatcgttagttgtattttttttggaacacc

SEQ ID NO: 43240 - DNA, 201 bp, Homo sapiens
aaacctataattttacttatgtcattcccacttcaagttctttttggaacaaaatataaaagtgacttatttgagggtgattcaggaatattaatggtgtyacttagcttgtataggtgtttaacctggaagtcctagttctgtgtaaaagatactccataataagtgtttaaaagcaaaccacttcatgatttcgtatct

SEQ ID NO: 43241 - DNA, 201 bp, Homo sapiens
gaaataggaacttctggcatgttttctgtcaataagggcaagtaattctctggttaaatagagcattctgatgggatgaaaaggcccaactccctagtttytcccctggtgtagtaacattaacagtgggattgttctgtggttgcacattcaatgtctagaattgtctagaattgcctacagcgttgtggttgacagaaa

SEQ ID NO: 43242 - DNA, 201 bp, Homo sapiens
gtatgctgcttgtttactattaatttactattaaaaatattccttttttattaacgtgctatttcttttgtagggaaaaaccttattttaattgttttctytttcttttttttcatttttaaagggactacaagaaataactttgaagggaaaaaagtcattagcttagaatatgaagcatatctacccatggcggaaaat

SEQ ID NO: 43243 - DNA, 201 bp, Homo sapiens
agcgccgtcgggttacgcctgcgctccgggtgagcccgcgcctgcgcctttgcggccgtgattcggtcccgctgtcctaggcgggatggtgccgctgtgcyaggtaagggtggcgggtgtgcgtgcgggcctgggtgcggagccctcctcgacgtgtctctcccgccctttccctccacatacccagccttggtcagtcgg

SEQ ID NO: 43244 - DNA, 201 bp, Homo sapiens
ttgattaaagcaatacatttggaaaatgagaaaactgctcaacattgacagtcagaaaacgagtatgagttgttattaaaagcattttctttactttcagkttgaagtattgtattttgcaaaaagtgctgaaataacaggagttcgttcagagaccatttctgtgcctcaagaaataaaagcgttgcagctgtggaagga

SEQ ID NO: 43245 - DNA, 201 bp, Homo sapiens; identical to SEQ ID NO: 36187

SEQ ID NO: 43246 - DNA, 201 bp, Homo sapiens
gccttgggggttcccagtcttgagggggcagagggtaggagggttcccaagtcactctctgcctctcttgccccatttttctggtagggtctggcaggccycccagggagagaaggaatcccaggacccctggggccacctggaccaccggggtcagtggtgagtagaggtgccctaaagccccacgtatttgatttcctg

SEQ ID NO: 43247 - DNA, 201 bp, Homo sapiens
tgacttcttcttcttcgtcaatgacttcagcatcttgaggacactactgcccctcgtttcccggagagtgtgcacgactgctggtggcgtgcctgtgaccygacctcgtgagttcctgcccacacggtgtaccctgacctagaccccggaccccaatccccacttggcagtgctgattccatcctatgtgctcctgacccc

SEQ ID NO: 43248 - DNA, 201 bp, Homo sapiens
cttgagagtacagtggacagcggccagtggccctgtgactggctacaaggtccagtacactcctctgacggggctgggacagccactgccgagtgagcggyaggaggtaggatgtcaggagtgataggtggtggctggggacttggctgggcaagataaagtgacctcttgccctgggcaggtgaacgtcccagctggtga

SEQ ID NO: 43249 - DNA, 201 bp, Homo sapiens
ggtgggagcctggggtggtggtgcagtgcccacgttgacattcgcctgagcccaagcaccaccctctgctctgtttcgtcctcagggagagcgaggacctygaggcccaaagggggagccggtaggtgaagggggaagggaggcggccgggatgtcccagggaggagcaggactgccccacaccagaccctgtgcagggcc

SEQ ID NO: 43250 - DNA, 201 bp, Homo sapiens
agtgtgggcacgctcagaatgagggggccacgggtggacgggggccaagttcatgtctttttttctccagggggagcctggtgtgccgggccagtcggggrcccctggcaaggagggcctgatcggtcccaaggtacagggtctgtggacagtggacatgacagggagtcaggatggggcagggaagctcatggtcgggtc

SEQ ID NO: 43251 - DNA, 201 bp, Homo sapiens
accgaggctttgacgggcagccaggccccaagggtgaccagggcgagaaaggggagcgggtgagttgaagccatggtcatggtgaattgaggggagcgtgsactttgggagagggtccatctctggggcctctgattactgactctgtcctatatctccccagggaaccccaggaattgggggcttcccaggccccagtgg

SEQ ID NO: 43252 - DNA, 201 bp, Homo sapiens
agataaggagataagagttccctccaggtcagaggtcgtggttttggagggggtggttggagtttgggaccccttgtctggggtttgacgttcaagccccsccaccaaccctctctctctctgtctttctctcaccctctctcttcagggtgaccggggctttccagggcccctgggtgaggctggagagaaggtaagtgc

SEQ ID NO: 43253 - DNA, 201 bp, Homo sapiens
cccccatccatggggtctgtgcctgagggatctcaatgggacctctcagtcctgggggtctctaccctggagggagatctttttggggtcctcttagtccwtggggtgtgccccaagggatatctcagaggccctataaatcttaacaaagactttttccaggggcttccaggcctccgtggagaacagggcctccctggc

SEQ ID NO: 43254 - DNA, 201 bp, Homo sapiens
agaccctgggcggcctggccccccaggacctgttggcccccgaggacgagatgtaagaggctggagtcgggggagtcatggcgggtaagggagtagggctrttgccagcatcatgggggttcttggaaccagggctgactctcatgtttcacagggtgaagttggagagaaaggtgacgagggtcctccggtgagactcct

SEQ ID NO: 43255 - DNA, 201 bp, Homo sapiens
tggccttactggcagagcaggacccccagtgagtacccgttaccctgggcaacctcaaggcttctggggtcccctccccttgagaactgcttgcttcgagygtcctgcatcacctccctcttgcctcctccacagggtgactcagggcctcctggagagaagggagaccctgggcggcctggccccccaggacctgttggc

SEQ ID NO: 43256 - DNA, 201 bp, Homo sapiens
tctccaggctctgtgcacccccatccctgctctgtcatcctcctcaggctctgtgtttccttccaccccaggttggcctgctgtcttacagtcatcggccytccccactgttcccactgaatggctcccatgaccttggcattatcttgcaaaggatccgtgacatgccctacatggacccaagtgggaacaacctgggtg

SEQ ID NO: 43257 - DNA, 201 bp, Homo sapiens
aggaacagtcccgggtcctggggcccgagctcagcagctatcacctggacgggctggagccagcgacacagtaccgcgtgaggctgagtgtcctagggccrgctggagaagggccctctgcagaggtgactgcgcgcactggtaagcctgcctcaccttggcgtgctcctcccctgctgatgacccaccctgacttcctgc

SEQ ID NO: 43258 - DNA, 201 bp, Homo sapiens
ccagtaggctggtgctccaccagttcatccatccactccctgcctcctgtccagctgctgctcagacccttctctgtcccctctccctgagtgagttagakcctgactgccctgtgcagtatgacttttctctctatcaccagggtgacccgggtttgcctggaaaagcaggcgagcgtggccttcgggtgagtcttggca

SEQ ID NO: 43259 - DNA, 201 bp, Homo sapiens
cctgtgggtgaaaagggagaccagggagatcctggagaggatggacgaaatgtgagtcccagcctatgactcctcaccccaaccttaaccctccaaccagscaattcccaatacctgatcctaccccccaaccctgtaatgctaaaccctcccaatcttcacttcctttgacccctgcacacacgcatctgaaggctacca

SEQ ID NO: 43260 - DNA, 201 bp, Homo sapiens
ctgcatcacctccctcttgcctcctccacagggtgactcagggcctcctggagagaagggagaccctgggcggcctggccccccaggacctgttggccccygaggacgagatgtaagaggctggagtcgggggagtcatggcgggtaagggagtagggctgttgccagcatcatgggggttcttggaaccagggctgactc

SEQ ID NO: 43261 - DNA, 201 bp, Homo sapiens
cacctccctcttgcctcctccacagggtgactcagggcctcctggagagaagggagaccctgggcggcctggccccccaggacctgttggcccccgaggaygagatgtaagaggctggagtcgggggagtcatggcgggtaagggagtagggctgttgccagcatcatgggggttcttggaaccagggctgactctcatgt

SEQ ID NO: 43262 - DNA, 201 bp, Homo sapiens
aacttgggggcagagttgagcctggggcaaaccagagccatggcctgggacctgagggctcctattgactataatcatttcctttcccagggtcccccagracccccgggacggctggtaagggctgcgctgggtctggtcctctgtcattgttctcacttgcccctttggctccacatcatgtcccctcattccttccac

SEQ ID NO: 43263 - DNA, 201 bp, Homo sapiens
aaggtgagagggtgtgggggtttctcaggacatgagcctgggttatcagatccacctcagccttggtggcctcttaccactctattttccacagggtgacyggggtccccctgggctggatggccggagcggactggatgggaaaccaggagccgctgggccctctgggccgaatgtgagtcttggtagtcctgcctggtt

SEQ ID NO: 43264 - DNA, 201 bp, Homo sapiens
tgtgggggtttctcaggacatgagcctgggttatcagatccacctcagccttggtggcctcttaccactctattttccacagggtgaccggggtccccctrggctggatggccggagcggactggatgggaaaccaggagccgctgggccctctgggccgaatgtgagtcttggtagtcctgcctggttgtccccttcccc

SEQ ID NO: 43265 - DNA, 201 bp, Homo sapiens
gccccaggctgcctctatgctgtgctctccaacaggaccagagctgcctgtgagccctgtaacagacctgcaagccaccgagctgcccgggcagcgggtgygagtgtcctggagcccagtccctggtgccacccagtaccgcatcattgtgcgcagcacccagggtgaggtggacgcagccagcacccccaccacacacac

SEQ ID NO: 43266 - DNA, 201 bp, Homo sapiens
agccttggtggcctcttaccactctattttccacagggtgaccggggtccccctgggctggatggccggagcggactggatgggaaaccaggagccgctgrgccctctgggccgaatgtgagtcttggtagtcctgcctggttgtccccttcccctaccccttcacatgaggaccctagaccccagcctcattggttggtc

SEQ ID NO: 43267 - DNA, 201 bp, Homo sapiens
gggagatctttttggggtcctcttagtccatggggtgtgccccaagggatatctcagaggccctataaatcttaacaaagactttttccaggggcttccasgcctccgtggagaacagggcctccctggcccctctggtccccctggattaccggtgagaccagactttcatgttacccccttttcccccttactaccctc

SEQ ID NO: 43268 - DNA, 201 bp, Homo sapiens
gtacagccaccagcattctctcttccactcctgcagggccccatcggctttcctggagaacgcgggctgaagggcgaccgtggagaccctggccctcaggrgccacctggtctggcccttggggagaggggcccccccgggccttccggccttgccggggagcctggaaagcctggtattcccgggctcccaggcagggct

SEQ ID NO: 43269 - DNA, 201 bp, Homo sapiens
ctgcagggccccatcggctttcctggagaacgcgggctgaagggcgaccgtggagaccctggccctcaggggccacctggtctggcccttggggagagggscccccccgggccttccggccttgccggggagcctggaaagcctggtattcccgggctcccaggcagggctgggggtgtgggagaggcaggaaggccagga

SEQ ID NO: 43270 - DNA, 201 bp, Homo sapiens
ccccatcggctttcctggagaacgcgggctgaagggcgaccgtggagaccctggccctcaggggccacctggtctggcccttggggagaggggcccccccrggccttccggccttgccggggagcctggaaagcctggtattcccgggctcccaggcagggctgggggtgtgggagaggcaggaaggccaggagagagggt

SEQ ID NO: 43271 - DNA, 201 bp, Homo sapiens
ggtgactctgtgacttctgggcggggactgagctgtatgacttccaattccatgtgacctccattccaatgaagactttgatcatacaaccccaaggcagsgccaagctgtatctgtcctgtttgttttcagggacctgctgttgctggacccaaaggagaaaaggtaagcctggtatggggcaaggggaggtttctacag

SEQ ID NO: 43272 - DNA, 201 bp, Homo sapiens
gtgggggcagtcagagagcatgtgggtgactgagtcctgatgggtcgtcacttcagggatcaagaatgctgaccctgaggagctgaagcgagttgcctcayagcccaccagtgacttcttcttcttcgtcaatgacttcagcatcttgaggacactactgcccctcgtttcccggagagtgtgcacgactgctggtggcgt

SEQ ID NO: 43273 - DNA, 201 bp, Homo sapiens
gtgactctgtgacttctgggcggggactgagctgtatgacttccaattccatgtgacctccattccaatgaagactttgatcatacaaccccaaggcaggkccaagctgtatctgtcctgtttgttttcagggacctgctgttgctggacccaaaggagaaaaggtaagcctggtatggggcaaggggaggtttctacagg

SEQ ID NO: 43274 - DNA, 201 bp, Homo sapiens
tcctcttagtccatggggtgtgccccaagggatatctcagaggccctataaatcttaacaaagactttttccaggggcttccaggcctccgtggagaacarggcctccctggcccctctggtccccctggattaccggtgagaccagactttcatgttacccccttttcccccttactaccctcacccgatccccgacatc

SEQ ID NO: 43275 - DNA, 201 bp, Homo sapiens
ggcacaaacacactggtgtgtagccacatttggggcacttagagacatgttgatacccagacacttccacccagactcatgtgctaagacatggacccaakaccgcatgtggacctgtgttgagacatggtgagacacacatggatggctctgacctgtgacatgtgctaggacatgctggcccatgactttatatggtca

SEQ ID NO: 43276 - DNA, 201 bp, Homo sapiens
acatgtgctaggacatgctggcccatgactttatatggtcacccacacgcttatggtcatacacattgagctacacacaagagttgcagacagatgccaakacacatggctctcaaggcatgtataagcccatgctctttggagacatgtataagcccatgcccatatgcagacatgggccaagatgtgcaaacagaccag

SEQ ID NO: 43277 - DNA, 201 bp, Homo sapiens
agacaccagtgaatgtttgggctgatgtgagtcctctgcccacagggagaacctggggaccctggagaagacgggaggaaggtaaagtcccccacctgggktctctctggtctctgcttggagccatgcctgaagcatccttgtcttccttagggagagaaaggagattcaggcgcctctgggagagaagtgagtattgga

SEQ ID NO: 43278 - DNA, 201 bp, Homo sapiens
gacaccagtgaatgtttgggctgatgtgagtcctctgcccacagggagaacctggggaccctggagaagacgggaggaaggtaaagtcccccacctggggyctctctggtctctgcttggagccatgcctgaagcatccttgtcttccttagggagagaaaggagattcaggcgcctctgggagagaagtgagtattggag

SEQ ID NO: 43279 - DNA, 201 bp, Homo sapiens
ctcagaagggatggagggtcccctggcgctgctgccagtgtgccttcacacaaggggtctggaggtccaggtgggaagcatggatggccacccatgcctgytgggggctggcattggggtgcttcggggaacttgggggcagagttgagcctggggcaaaccagagccatggcctgggacctgagggctcctattgactat

SEQ ID NO: 43280 - DNA, 201 bp, Homo sapiens
ttaccctcacctcttatctgaccctgttccctccagggggacccaggtgtccgaggcccagcaggagaaaaggtgagagggtgtgggggtttctcaggacrtgagcctgggttatcagatccacctcagccttggtggcctcttaccactctattttccacagggtgaccggggtccccctgggctggatggccggagcgg

SEQ ID NO: 43281 - DNA, 201 bp, Homo sapiens
ctggccccaggctccggaccctccgctaggtgctgctgctgctgtgtgtgtgcatgtctgtgtgtgtgtgtttgtgtgtacctgtgtctgtgtgcctctckgtgtgtgcctgcttgtgtgtgcctgtgtctgtgtgtgcctgtgtgtgcctgtgtctgtgtgtggttgtatgtggatgtgtgtgtgcaggcccgtgtgtgc

SEQ ID NO: 43282 - DNA, 201 bp, Homo sapiens
tcagggtgctgcaggcaaagctggggacccagggagagacgtaagtgaggggagatgctgggacagagggggctcggggctgcgtaagctccaaccagatyatcatagtcacagcatccgagagagttggtggggggtcggttcagccttgcctttgggagggtctcagtccctggcacacaggttttagtagaatccccc

SEQ ID NO: 43283 - DNA, 201 bp, Homo sapiens
tccccacagggggagccgggcagcaatggtgaccaaggtcccaaaggagacagggtgaggcctctctccacccttccatagagtccccctcctttctgggsgcacactagaggtggtgtgcatatgcacctgggcacgtggcagggactgggggctcagggcacgacactctgccttcagggtgtgccaggcatcaaagga

SEQ ID NO: 43284 - DNA, 201 bp, Homo sapiens
aaaggacctcggggagacaatggggaccctggtgacaaggtacagggaagagggtggtgtactctctgtggggtcctgtggctgtggtggttccacagcawctgtgagggcaggaggggaggacaggaggaggctttctggggttcagggggaaggggttctgtggctgactatggagtggccgagaggaggggctctagg

SEQ ID NO: 43285 - DNA, 201 bp, Homo sapiens
agaacgcgggctgaagggcgaccgtggagaccctggccctcaggggccacctggtctggcccttggggagaggggcccccccgggccttccggccttgccdgggagcctggaaagcctggtattcccgggctcccaggcagggctgggggtgtgggagaggcaggaaggccaggagagagggtgaggctgggggctggcca

SEQ ID NO: 43286 - DNA, 201 bp, Homo sapiens
cttttgaccttatagtgacccagtgctctcatggtgtcctcatgtcacccagggtcccccacctccacagtagccgcctatgatggtgtcccctgcctatsgtgacccttgtccccatggcaagccccagtggctctggcctccagaggtgactcccaccccatggtgttccctacccactatccagggcgattctctttg

SEQ ID NO: 43287 - DNA, 201 bp, Homo sapiens
cgaccgtggagaccctggccctcaggggccacctggtctggcccttggggagaggggcccccccgggccttccggccttgccggggagcctggaaagcctrgtattcccgggctcccaggcagggctgggggtgtgggagaggcaggaaggccaggagagagggtgaggctgggggctggccaggagagtgagggaagagg

SEQ ID NO: 43288 - DNA, 201 bp, Homo sapiens
ggggagaggggcccccccgggccttccggccttgccggggagcctggaaagcctggtattcccgggctcccaggcagggctgggggtgtgggagaggcagraaggccaggagagagggtgaggctgggggctggccaggagagtgagggaagaggggttgggaggggtgggaccccccatgggcttggccctcacccgcta

SEQ ID NO: 43289 - DNA, 201 bp, Homo sapiens
ttctctccagcgcctgaggctccgccagccctggggacgcttcacgtggtgcagcgcggggagcactcgctgaggctgcgctgggagccggtgcccagagmgcagggcttccttctgcactggcaacctgagggtgagaggtgtccccaggaggaagttagggaccattgggggcagggctgtggcagactccgcaaggta

SEQ ID NO: 43290 - DNA, 201 bp, Homo sapiens
tggagaacaggtgggctgcgatgggcttcgtggggcaggctgtctggaggctgtgctggggctgccaccccattttcttgtttcctgcagggcagagatgrccctcctggactccctggaacccctgggccccccggaccccctggccccaaggtgatcaccccatccctgccttagtcctgtgactagtgaccaggaagc

SEQ ID NO: 43291 - DNA, 201 bp, Homo sapiens
aggtgggctgcgatgggcttcgtggggcaggctgtctggaggctgtgctggggctgccaccccattttcttgtttcctgcagggcagagatggccctcctrgactccctggaacccctgggccccccggaccccctggccccaaggtgatcaccccatccctgccttagtcctgtgactagtgaccaggaagccaccctta

SEQ ID NO: 43292 - DNA, 201 bp, Homo sapiens
ggtgggctgcgatgggcttcgtggggcaggctgtctggaggctgtgctggggctgccaccccattttcttgtttcctgcagggcagagatggccctcctgractccctggaacccctgggccccccggaccccctggccccaaggtgatcaccccatccctgccttagtcctgtgactagtgaccaggaagccacccttag

SEQ ID NO: 43293 - DNA, 201 bp, Homo sapiens
agtccccctcctttctgggggcacactagaggtggtgtgcatatgcacctgggcacgtggcagggactgggggctcagggcacgacactctgccttcaggrtgtgccaggcatcaaaggagaccggggagagcctggaccgaggggtcaggacggcaacccggtaagtccttgcccaacagccacacatgtgcaagaaggt

SEQ ID NO: 43294 - DNA, 201 bp, Homo sapiens
aggaggaagagggagttctgatgagagtcctgggaggggtcctgcattgaccattccctccctttgctgtttttatttcagggagatctgggcctccctgrcctgcccggtgctcctggtgttgttgggttcccgggtcagacaggccctcgaggagagatgggtcagccaggccctagtggagagcgggtgaggggctgg

SEQ ID NO: 43295 - DNA, 201 bp, Homo sapiens
gcccaccttgccccggggccagcagccactgctcccagcacaccctgccctacctgcagagcgggtaccccctgaggatgatgagtactctgaatactcckagtattctgtggaggagtaccaggaccctgaagctccttgggatagtgatggtgagaatggggggctgcgcccagcggggtctggggaggggcaggcagg

SEQ ID NO: 43296 - DNA, 201 bp, Homo sapiens
acctggggtctctctggtctctgcttggagccatgcctgaagcatccttgtcttccttagggagagaaaggagattcaggcgcctctgggagagaagtgastattggagttttctgcaacctctgacccctgaccctgaccctgggggaatatgactccactcttttctgaggtctcagggtgctgatgctggctgcatcc

SEQ ID NO: 43297 - DNA, 201 bp, Homo sapiens
ccccagctggcgggctcgttgtattctaagcccccagcctgatctggtcctgactgaatccctctcctggtcactcccacagggcagcaagggagagcctsgtgacaagggctcagccgggttgccaggactgcgtggactcctgggaccccaggcaagttctgccccaggcccaggcccaggcccaggtccagagccagc

SEQ ID NO: 43298 - DNA, 201 bp, Homo sapiens
tctctctggtctctgcttggagccatgcctgaagcatccttgtcttccttagggagagaaaggagattcaggcgcctctgggagagaagtgagtattggasttttctgcaacctctgacccctgaccctgaccctgggggaatatgactccactcttttctgaggtctcagggtgctgatgctggctgcatccttcacagg

SEQ ID NO: 43299 - DNA, 201 bp, Homo sapiens
gacctcacatggaccctctccctgctagggatccccaggaaaggatggagtgcctggtatccgaggagaaaaaggagatgttggcttcatgggtccccggkgcctcaaggtaggaaagaaacaagattggtttttttctggtcaggaaggcctaatgttgaagggcgagggacctggggtcagatattagggcactgggtc

SEQ ID NO: 43300 - DNA, 201 bp, Homo sapiens
caaaggacctcggggagacaatggggaccctggtgacaaggtacagggaagagggtggtgtactctctgtggggtcctgtggctgtggtggttccacagcwtctgtgagggcaggaggggaggacaggaggaggctttctggggttcagggggaaggggttctgtggctgactatggagtggccgagaggaggggctctag

SEQ ID NO: 43301 - DNA, 201 bp, Homo sapiens
ggtgcttgggttacagaaggtttgggcattaggccagggagctcatgggagttcagggaggttccagagctgagggaggtcagggcagaaggtctctcatscttcttctgttcccagggtgaccgaggctttgacgggcagccaggccccaagggtgaccagggcgagaaaggggagcgggtgagttgaagccatggtcat

SEQ ID NO: 43302 - DNA, 201 bp, Homo sapiens
gtgcttgggttacagaaggtttgggcattaggccagggagctcatgggagttcagggaggttccagagctgagggaggtcagggcagaaggtctctcatgmttcttctgttcccagggtgaccgaggctttgacgggcagccaggccccaagggtgaccagggcgagaaaggggagcgggtgagttgaagccatggtcatg

SEQ ID NO: 43303 - DNA, 201 bp, Homo sapiens
tcccatctgttgcacataggggcggccagggcctgccggtcctcgaggcgagaagggagaagctgcactgacggtgagtgtgggcctggatgggcctgggwgggcctgggtgggcctgggtgggctggggccctacctccctcacccagcaccctgacccctgggccctggctccatgcagtctcaccatagtccctgtat

SEQ ID NO: 43304 - DNA, 201 bp, Homo sapiens
acgtccgttatttcagtgacttggtcccgtgggtctagccttcccccctgtggacaaacccccattgtggctcctgccaccctggcagatgactcactgtsggggggtggctgtgggcagtgagcggatgtgactggcgtctgacccgccccttgacccaagcctgtgatgacatggtgctgattctggggggcattaaag

SEQ ID NO: 43305 - DNA, 201 bp, Homo sapiens
taccccttcacatgaggaccctagaccccagcctcattggttggtcttggccttgacgagctctggggcgagacctgttgtctgtgtcttctcccagagcyctgcctgggtggggcatgttcttgccatgcaggccttaggctcacagggactagagcccctgaccccatgaccatgatgaactgactttgagtctctcct

SEQ ID NO: 43306 - DNA, 201 bp, Homo sapiens
cctgggtcattctgggacttcagagcattagaagccatgatgtttcaatgggcaaccctcctgggaagccatgggcctttgtgacccctttgtgttctgcygtatctcagggttttcctggtgtcccaggaggcacgggccccaaggtgagtgcggatgttgggtagggggcgtggtgagggggctgaccaggctgggggc

SEQ ID NO: 43307 - DNA, 201 bp, Homo sapiens
cttgccctgggcaggtgaacgtcccagctggtgagaccagtgtgcggctgcggggtctccggccactgaccgagtaccaagtgactgtgattgccctctamgccaacagcatcggggaggctgtgagcgggacagctcggaccagtgagcaattctgccagcctctgaccccattcacctaacccccgaccccagtacccc

SEQ ID NO: 43308 - DNA, 201 bp, Homo sapiens
ggttggccctggggcctgactactgagcagagaaggctcagtccagacacccctcacctgccattctgtgcagggtgaagctggccgtgcaggggagcccrgagaccctggggaagatgtgagtccggggcctaggcaagggcgagcctggcctgaggagtgtgatggcgggcataaggggccactcttgggccggggcac

SEQ ID NO: 43309 - DNA, 201 bp, Homo sapiens
cggagagtgtgcacgactgctggtggcgtgcctgtgacccgacctcgtgagttcctgcccacacggtgtaccctgacctagaccccggaccccaatccccmcttggcagtgctgattccatcctatgtgctcctgaccccgaccccaactctgcatcatacatgcccaccccaatcctcctgcctgatcccctgatcccgc

SEQ ID NO: 43310 - DNA, 201 bp, Homo sapiens
tgtggatcggttgctggaaactgctggcatcaaggtgggttgtttaggggctgggggtagggacaagtgggggcccttggggctagtggtgcccacaggcrtaggggctgcggcgacgcaccccgctcctctgacctcttgctgtccctcaggcatctgccctgcgggagatcgtggagacctgggatgagagctctggta

SEQ ID NO: 43311 - DNA, 201 bp, Homo sapiens
ctctctaagtgtcttcccagggttcttccacagggtgggagcctggggtggtggtgcagtgcccacgttgacattcgcctgagcccaagcaccaccctctsctctgtttcgtcctcagggagagcgaggacctcgaggcccaaagggggagccggtaggtgaagggggaagggaggcggccgggatgtcccagggaggagc

SEQ ID NO: 43312 - DNA, 201 bp, Homo sapiens
aggtgaaggacctgggcttcctgggcggaaaggggaccctggaccatcggtaagtgcagggtatgtggaggcaagtgatgtgtagtggggggaccaacacsaggggggcgagagtgaggtctgtggggttgcaccttatactttgtctcctccatcagggcccccctggacctcgtggaccactgggggacccaggacccc

SEQ ID NO: 43313 - DNA, 201 bp, Homo sapiens
ctggacctcgtggaccactgggggacccaggaccccgtggccccccagggcttcctggaacagccatgaaggtgacagcctcatgagtgccatgtgatgcrgagacctggtgaccccatttgaacccacataacccctgccagttactctggcccttgtgaccctttgattacccccatcctcaccatgacgcctcagttc

SEQ ID NO: 43314 - DNA, 201 bp, Homo sapiens
gggcattaggccagggagctcatgggagttcagggaggttccagagctgagggaggtcagggcagaaggtctctcatgcttcttctgttcccagggtgacygaggctttgacgggcagccaggccccaagggtgaccagggcgagaaaggggagcgggtgagttgaagccatggtcatggtgaattgaggggagcgtgcac

SEQ ID NO: 43315 - DNA, 201 bp, Homo sapiens
ggaattgggggcttcccaggccccagtggaaatgatggctctgctggtcccccagggccacctggcagtgttggtcccagaggccccgaaggacttcaggsccagaaggtaaggggccccagctctgactcctgatccctgaaccttccctacccttccaacctcataaccatcttccagcctgcctgccccaacctctga

SEQ ID NO: 43316 - DNA, 201 bp, Homo sapiens
ctctgaagctgtggcccccaacctgcctgactctgatccccactgcctctgaccctgctcacttggtccctgtgtctgacagggtgagcgaggtccccccrgagagagagtggtgggggctcctggggtccctggagctcctggcgagagaggggagcaggtgagtagggattccaaggcttgggtcagagatcggggtga

SEQ ID NO: 43317 - DNA, 201 bp, Homo sapiens
aagggaacttgggcagtggggacacaccagaaaggggctcccaggagtctccagccatgcctcaaccaagtgctaaagggtgctctgggcaagaggcctarggaaaagggtgtgaaggtgctttcctgaggccgtgcggggcagaaggcaggagcttctctgtcatgggcagcccttcacccagactttgtccccagaatg

SEQ ID NO: 43318 - DNA, 201 bp, Homo sapiens
tgaggctctgctgggggccctgctcaggggtgtgggtctctcctggggcagtggttgggtgctgggcttcatagttcttggctcatatttttactcacttmttcctagggtcttcccggaagccctggaccccaaggccccgttggcccccctggaaagaaaggagaaaaagtaggaaggctgacttgatgatgtcccagt

SEQ ID NO: 43319 - DNA, 201 bp, Homo sapiens
gccactggaccccaccttagggcttaatgtggtgatgttgggaatggctggagcggacccagagcagctgcgtcgcttggcgccgggtatggactctgtcyagaccttcttcgccgtggatgatgggccaagcctggaccaggcagtcagtggtctggccacagccctgtgtcaggcatccttcactactcaggtttggaa

SEQ ID NO: 43320 - DNA, 201 bp, Homo sapiens
gggaggatggcgctctgagcacagcacagcccttgagcagtgaccctcctatagaacactatctgggctgtgattccacagtgctgggcccgtgagcaggytgggagctctgcggctctccttctgctagaacctgcccccagactcttggctatgatcctgtgaccccaagaccgccatgcaggtcatgagctctttgtg

SEQ ID NO: 43321 - DNA, 201 bp, Homo sapiens
cacacacacatatcctgggggtcctcttaagtgctgggggttctggctcccttgctgccggccccatgtgtgttcacccgggatctgtgtgtggcctgggmcctggccgctgagcatctgagtggccacacatgcagcggatgggccagtgttggggacagtcccactgaagggctcccccatctgtgtttctcacagggt

SEQ ID NO: 43322 - DNA, 201 bp, Homo sapiens
cttaggggttgagcggaccctggtgcttcctgggagtcagacagcattcgacttggatgacgttcaggctgggcttagctacactgtgcgggtgtctgctygagtgggtccccgtgagggcagtgccagtgtcctcactgtccgccggggtgagtactgcaggaggcttgtggaggacagctgcctgcctcactctggtcc

SEQ ID NO: 43323 - DNA, 201 bp, Homo sapiens
agtaatggggaacctggggcagtgtagcgggtcataggggcacctgcaaaatattgggagggtctgtctcaggccagctgctcttcttagggggcacctgsagttcgggggcctgtgggtgaaaagggagaccagggagatcctggagaggatggacgaaatgtgagtcccagcctatgactcctcaccccaaccttaacc

SEQ ID NO: 43324 - DNA, 201 bp, Homo sapiens
gggtgtagctgtacagccaccagcattctctcttccactcctgcagggccccatcggctttcctggagaacgcgggctgaagggcgaccgtggagaccctrgccctcaggggccacctggtctggcccttggggagaggggcccccccgggccttccggccttgccggggagcctggaaagcctggtattcccgggctccc

SEQ ID NO: 43325 - DNA, 201 bp, Homo sapiens
tctgacctcacatggaccctctccctgctagggatccccaggaaaggatggagtgcctggtatccgaggagaaaaaggagatgttggcttcatgggtcccyggggcctcaaggtaggaaagaaacaagattggtttttttctggtcaggaaggcctaatgttgaagggcgagggacctggggtcagatattagggcactgg

SEQ ID NO: 43326 - DNA, 201 bp, Homo sapiens
gaccccttaccttgcctctgtccccagcccctgagcctgtgggtcgtgtgtcgaggctgcagatcctcaatgcttccagcgacgttctacggatcacctgrgtaggggtcactggagccacagcttacagactggcctggggccggagtgaaggtatggctccctgacgccacccctgtccttcctggctgggactgctca

SEQ ID NO: 43327 - DNA, 201 bp, Homo sapiens
aaactgctggcatcaaggtgggttgtttaggggctgggggtagggacaagtgggggcccttggggctagtggtgcccacaggcataggggctgcggcgacrcaccccgctcctctgacctcttgctgtccctcaggcatctgccctgcgggagatcgtggagacctgggatgagagctctggtagcttcctgcctgtgccc

SEQ ID NO: 43328 - DNA, 201 bp, Homo sapiens
ttttgaccttatagtgacccagtgctctcatggtgtcctcatgtcacccagggtcccccacctccacagtagccgcctatgatggtgtcccctgcctatgstgacccttgtccccatggcaagccccagtggctctggcctccagaggtgactcccaccccatggtgttccctacccactatccagggcgattctctttgg

SEQ ID NO: 43329 - DNA, 201 bp, Homo sapiens
tgaccgaggctttgacgggcagccaggccccaagggtgaccagggcgagaaaggggagcgggtgagttgaagccatggtcatggtgaattgaggggagcgwgcactttgggagagggtccatctctggggcctctgattactgactctgtcctatatctccccagggaaccccaggaattgggggcttcccaggccccagt

SEQ ID NO: 43330 - DNA, 201 bp, Homo sapiens
cagagatggccctcctggactccctggaacccctgggccccccggaccccctggccccaaggtgatcaccccatccctgccttagtcctgtgactagtgascaggaagccacccttagcttggtccccagaaatatggtagtgtgtgccataaccctggaatttctgaccctataaccctctgtgatcctgagatctgtga

SEQ ID NO: 43331 - DNA, 201 bp, Homo sapiens
ttttggggtcctcttagtccatggggtgtgccccaagggatatctcagaggccctataaatcttaacaaagactttttccaggggcttccaggcctccgtrgagaacagggcctccctggcccctctggtccccctggattaccggtgagaccagactttcatgttacccccttttcccccttactaccctcacccgatcc

SEQ ID NO: 43332 - DNA, 201 bp, Homo sapiens
atgggtaggtattatctgtgactggaaagggtgaggtatggaaattgacccccaaggaaaaagcccccagaggttgggaacaggcccaagtgaggcccagwttgaggctcatcagtgccctctctatgtagggtctgcagggtccaagaggcccccctggcccagtggtgagtacccaagaaccttcacctgtcttgcccc

SEQ ID NO: 43333 - DNA, 201 bp, Homo sapiens
ggtgtagctgtacagccaccagcattctctcttccactcctgcagggccccatcggctttcctggagaacgcgggctgaagggcgaccgtggagaccctgrccctcaggggccacctggtctggcccttggggagaggggcccccccgggccttccggccttgccggggagcctggaaagcctggtattcccgggctccca

SEQ ID NO: 43334 - DNA, 201 bp, Homo sapiens
ctgtgaccccaagaccgccatgcaggtcatgagctctttgtgtcagtccattttgtataaccccttccctgctgtcagcggtgactctgtgacttctgggmggggactgagctgtatgacttccaattccatgtgacctccattccaatgaagactttgatcatacaaccccaaggcagggccaagctgtatctgtcctgt

SEQ ID NO: 43335 - DNA, 201 bp, Homo sapiens
cccatcggctttcctggagaacgcgggctgaagggcgaccgtggagaccctggccctcaggggccacctggtctggcccttggggagaggggcccccccgsgccttccggccttgccggggagcctggaaagcctggtattcccgggctcccaggcagggctgggggtgtgggagaggcaggaaggccaggagagagggtg

SEQ ID NO: 43336 - DNA, 201 bp, Homo sapiens
tgcaggcccgtgtgtgctatctatgagaggcagtccatgggtaggtattatctgtgactggaaagggtgaggtatggaaattgacccccaaggaaaaagcycccagaggttgggaacaggcccaagtgaggcccagattgaggctcatcagtgccctctctatgtagggtctgcagggtccaagaggcccccctggcccag

SEQ ID NO: 43337 - DNA, 201 bp, Homo sapiens
ctttcctggagaacgcgggctgaagggcgaccgtggagaccctggccctcaggggccacctggtctggcccttggggagaggggcccccccgggccttccrgccttgccggggagcctggaaagcctggtattcccgggctcccaggcagggctgggggtgtgggagaggcaggaaggccaggagagagggtgaggctggg

SEQ ID NO: 43338 - DNA, 201 bp, Homo sapiens
gggtcatagggagatgggtggggttggcactgccctgaactttctcttcctccagggcctgactggacctactggagctgtgggacttcctggacccccckgcccttcaggccttgtggtgagtgagtccctgtggcccctgtagggacaccgtgttttcactccttggggcccatgttctctcatgtcgtcctgtgtcca

SEQ ID NO: 43339 - DNA, 201 bp, Homo sapiens
tgccacagacatcacagggctgcagcctggaaccacctaccaggtggctgtgtcggtactgcgaggcagagaggagggccctgctgcagtcatcgtggctygaacgggtcaggccctgcccccgtcccttggctctctgcctccattgctctttcagacccccatgccttcccttgcagacccttgcttctccccagaact

SEQ ID NO: 43340 - DNA, 201 bp, Homo sapiens
aaggtaagcctggtatggggcaaggggaggtttctacagggttgaggtctaggtcatagggcctatctatgggacttggggggtcacaggacttgctgggycagggggttaactggagcctgggactagcactgatggtctttgtcacctccagggagatgtggggcccgctgggcccagaggagctaccggagtccaagg

SEQ ID NO: 43341 - DNA, 201 bp, Homo sapiens
gtatcccctcgccaactcctcttccccttgttgagccattcttctcactggtcattccccccacaggtagacacaggacctggagccagagagaaggtatyagggtctgtgggtggagggtaagaaagaccccagtgcccctcccagcaggttctaccttgggcatggcttggcttcaaggctgttcctcagcaagcttat

SEQ ID NO: 43342 - DNA, 201 bp, Homo sapiens
ggagccagagagaaggtattagggtctgtgggtggagggtaagaaagaccccagtgcccctcccagcaggttctaccttgggcatggcttggcttcaaggmtgttcctcagcaagcttatctctgccacagggagagcctggggaccgcggacaagagggtcctcgagggcccaagggtgatcctggcctccctggagccc

SEQ ID NO: 43343 - DNA, 201 bp, Homo sapiens
gctagagcctggcgtctcttacatcttctccctgacgcctgtcctggatggtgtgcggggtcctgaggcatctgtcacacagacgccaggtatagtgggcrtagtgggaagggcagaaaggtgtgtctgggtgggctgcccgcttcagtaacttgttccccttcctacagtgtgcccccgtggcctggcggatgtggtgtt

SEQ ID NO: 43344 - DNA, 201 bp, Homo sapiens
tgtttccttccaccccaggttggcctgctgtcttacagtcatcggccctccccactgttcccactgaatggctcccatgaccttggcattatcttgcaaargatccgtgacatgccctacatggacccaagtgggaacaacctgggtgaggactgcagcaggcatggactcctggggctatccactgggagcttggtgccc

SEQ ID NO: 43345 - DNA, 201 bp, Homo sapiens
cgcatcattgtgcgcagcacccagggtgaggtggacgcagccagcacccccaccacacacactgaagttccagcctgaggggtctgagtgtacctccagcsctctccttccacacctgggtccctatagtctcctccctgtctcgttatccatctgcttcccaagatggcactgagccctgaactgtcaacagggtgtgtc

SEQ ID NO: 43346 - DNA, 201 bp, Homo sapiens
tgactcctgtcatcctacatgctaagatcccacagactcctgtcctccagtgtccctgaccatcactggcccctttcatcctatgtccttgtcttgcactsacttttttcagccatatcccagctctctggtccccaccaccccacatccccacccccatggcccttctcactctgcgtccctgtccatcactgccatcgt

SEQ ID NO: 43347 - DNA, 201 bp, Homo sapiens
gtccctgaccatcactggcccctttcatcctatgtccttgtcttgcactcacttttttcagccatatcccagctctctggtccccaccaccccacatcccmacccccatggcccttctcactctgcgtccctgtccatcactgccatcgtcccacatccctgtctctttctgacccctgcccacctaccctgacttctctc

SEQ ID NO: 43348 - DNA, 201 bp, Homo sapiens
cacaggatacagggtttcctggcactcagcccacggtggggactggggtttgggagggggcaggtcagggtggaatgggggctgggggtttattgggggtycaggtggggctctggggcacagagtttgctagccctggagctgcctccatccctgttcccaggcccagagaaatcccagttggtttctggggaggccacg

SEQ ID NO: 43349 - DNA, 201 bp, Homo sapiens
ctctaagtgtcttcccagggttcttccacagggtgggagcctggggtggtggtgcagtgcccacgttgacattcgcctgagcccaagcaccaccctctgcyctgtttcgtcctcagggagagcgaggacctcgaggcccaaagggggagccggtaggtgaagggggaagggaggcggccgggatgtcccagggaggagcag

SEQ ID NO: 43350 - DNA, 201 bp, Homo sapiens
ggtgagtgagtccctgtggcccctgtagggacaccgtgttttcactccttggggcccatgttctctcatgtcgtcctgtgtccattgtcaccctgacatcygacttgttctccgtcagggtccacaggggtctccaggtttgcctggacaagtggtgagttctgggggtcaagggttgggctccaggggtcaagggtcgac

SEQ ID NO: 43351 - DNA, 201 bp, Homo sapiens
cgtggagtggggtgtagctgtacagccaccagcattctctcttccactcctgcagggccccatcggctttcctggagaacgcgggctgaagggcgaccgtrgagaccctggccctcaggggccacctggtctggcccttggggagaggggcccccccgggccttccggccttgccggggagcctggaaagcctggtattcc

SEQ ID NO: 43352 - DNA, 201 bp, Homo sapiens
cctcaggggccacctggtctggcccttggggagaggggcccccccgggccttccggccttgccggggagcctggaaagcctggtattcccgggctcccagkcagggctgggggtgtgggagaggcaggaaggccaggagagagggtgaggctgggggctggccaggagagtgagggaagaggggttgggaggggtgggacc

SEQ ID NO: 43353 - DNA, 201 bp, Homo sapiens
ttacccccatcctcaccatgacgcctcagttctcccaaaatccttgaaatccaattggaccccatgaccctcatcactcctggtatctttgggagtgaggygtggcccagggtcatggggtcgtcatctgttttctagggtgacaaaggcgatcgtggggagcgggtaagtgagggacaggttgtgctaggggtggcttgg

SEQ ID NO: 43354 - DNA, 201 bp, Homo sapiens
agaccctggccctcaggggccacctggtctggcccttggggagaggggcccccccgggccttccggccttgccggggagcctggaaagcctggtattcccdggctcccaggcagggctgggggtgtgggagaggcaggaaggccaggagagagggtgaggctgggggctggccaggagagtgagggaagaggggttgggag

SEQ ID NO: 43355 - DNA, 201 bp, Homo sapiens
agggtcatagggagatgggtggggttggcactgccctgaactttctcttcctccagggcctgactggacctactggagctgtgggacttcctggacccccmggcccttcaggccttgtggtgagtgagtccctgtggcccctgtagggacaccgtgttttcactccttggggcccatgttctctcatgtcgtcctgtgtcc

SEQ ID NO: 43356 - DNA, 201 bp, Homo sapiens
ggaggatggcgctctgagcacagcacagcccttgagcagtgaccctcctatagaacactatctgggctgtgattccacagtgctgggcccgtgagcaggcygggagctctgcggctctccttctgctagaacctgcccccagactcttggctatgatcctgtgaccccaagaccgccatgcaggtcatgagctctttgtgt

SEQ ID NO: 43357 - DNA, 201 bp, Homo sapiens
cgggctccctggagcaaagggagagaaggtgagtgtgtgtggggctgccagtgagggggggtcaactggtgggggccaaggaatcccactgacctctcccscttaccagggagcccctggaggccttgctggagacctggtgggtgagccggtaagtagggaacttctgacagcagatgttctgggggtcctgtctctcca

SEQ ID NO: 43358 - DNA, 201 bp, Homo sapiens
gaccgtggagaccctggccctcaggggccacctggtctggcccttggggagaggggcccccccgggccttccggccttgccggggagcctggaaagcctgdtattcccgggctcccaggcagggctgggggtgtgggagaggcaggaaggccaggagagagggtgaggctgggggctggccaggagagtgagggaagaggg

SEQ ID NO: 43359 - DNA, 201 bp, Homo sapiens; identical to SEQ ID NO: 36189

SEQ ID NO: 43360 - DNA, 201 bp, Homo sapiens
cctggcagcaggggagagcgtggggagaaggtaggaacgtggggaaggtcctggcatgagtgggggggtgagtggatcttgtatgatattagaattcaggygcggggcctccccagtttgggcgggactcacactcttttgcccaatagggtgatgttgggagtgcaggactaaagggtgacaaggtgagtgtgggcatgg

SEQ ID NO: 43361 - DNA, 201 bp, Homo sapiens
gggagagcctggggaccgcggacaagagggtcctcgagggcccaagggtgatcctggcctccctggagcccctggggaaagggtgagtgtgattggtcctygggggtgcaggcatgggagggcctgctctgatttcttcctcccctatcctcagggcattgaagggtttcggggacccccaggcccacaggtgagtgatgc

SEQ ID NO: 43362 - DNA, 201 bp, Homo sapiens
ccccatccatggggtctgtgcctgagggatctcaatgggacctctcagtcctgggggtctctaccctggagggagatctttttggggtcctcttagtccawggggtgtgccccaagggatatctcagaggccctataaatcttaacaaagactttttccaggggcttccaggcctccgtggagaacagggcctccctggcc

SEQ ID NO: 43363 - DNA, 201 bp, Homo sapiens
ccaggcctccgtggagaacagggcctccctggcccctctggtccccctggattaccggtgagaccagactttcatgttacccccttttcccccttactacsctcacccgatccccgacatccaaccagtgatctgttcccacagggaaagccaggcgaggatggcaaacctggcctgaatggaaaaaacgtgagtgtgtcc

SEQ ID NO: 43364 - DNA, 201 bp, Homo sapiens
cagactttcatgttacccccttttcccccttactaccctcacccgatccccgacatccaaccagtgatctgttcccacagggaaagccaggcgaggatggsaaacctggcctgaatggaaaaaacgtgagtgtgtccagggcagctgcggcgaaacctgccaagaaacgccagcacacctacacagccaagatctgtagca

SEQ ID NO: 43365 - DNA, 201 bp, Homo sapiens
ccccgtggagtggggtgtagctgtacagccaccagcattctctcttccactcctgcagggccccatcggctttcctggagaacgcgggctgaagggcgacbgtggagaccctggccctcaggggccacctggtctggcccttggggagaggggcccccccgggccttccggccttgccggggagcctggaaagcctggtat

SEQ ID NO: 43366 - DNA, 201 bp, Homo sapiens
tcctgcctgatcccctgatcccgcattcccagcggatgactcgacctctgctccacgagacctggtgctgtctgagccaagcagccaatccttgagagtayagtggacagcggccagtggccctgtgactggctacaaggtccagtacactcctctgacggggctgggacagccactgccgagtgagcggcaggaggtagg

SEQ ID NO: 43367 - DNA, 201 bp, Homo sapiens
cctgaggatgatgagtactctgaatactccgagtattctgtggaggagtaccaggaccctgaagctccttgggatagtgatggtgagaatggggggctgcscccagcggggtctggggaggggcaggcagggctgagccctgctgacctccccctgacctttcaaccctctctgattcccacaaaccctgctgacttgacc

SEQ ID NO: 43368 - DNA, 201 bp, Homo sapiens
ggaccccttaccttgcctctgtccccagcccctgagcctgtgggtcgtgtgtcgaggctgcagatcctcaatgcttccagcgacgttctacggatcacctrggtaggggtcactggagccacagcttacagactggcctggggccggagtgaaggtatggctccctgacgccacccctgtccttcctggctgggactgctc

SEQ ID NO: 43369 - DNA, 201 bp, Homo sapiens
tccctgaccatcactggcccctttcatcctatgtccttgtcttgcactcacttttttcagccatatcccagctctctggtccccaccaccccacatccccmcccccatggcccttctcactctgcgtccctgtccatcactgccatcgtcccacatccctgtctctttctgacccctgcccacctaccctgacttctctct

SEQ ID NO: 43370 - DNA, 201 bp, Homo sapiens
ctgaagggcgaccgtggagaccctggccctcaggggccacctggtctggcccttggggagaggggcccccccgggccttccggccttgccggggagcctgraaagcctggtattcccgggctcccaggcagggctgggggtgtgggagaggcaggaaggccaggagagagggtgaggctgggggctggccaggagagtgag

SEQ ID NO: 43371 - DNA, 201 bp, Homo sapiens
cgggggaggaggaggaaactcactagcattccccacaggctgtggtcgggctccctggagcaaagggagagaaggtgagtgtgtgtggggctgccagtgakggggggtcaactggtgggggccaaggaatcccactgacctctcccccttaccagggagcccctggaggccttgctggagacctggtgggtgagccggtaa

SEQ ID NO: 43372 - DNA, 201 bp, Homo sapiens
ggaagagggtggtgtactctctgtggggtcctgtggctgtggtggttccacagcatctgtgagggcaggaggggaggacaggaggaggctttctggggttyagggggaaggggttctgtggctgactatggagtggccgagaggaggggctctagggagggctcaaggccttggtgtgaggttaggagagctctgtggact

SEQ ID NO: 43373 - DNA, 201 bp, Homo sapiens
aaatgctgtttgctgggttttcttagggtcagaaaggggctccaggacccaaaggtttcaaggtatgtgtacccagaagggtccctgctggggtcctggtygtgagactccctgagcttgatccgatgcctcttttcctcaaagggtgacccaggagtcggggtcccgggctcccctgggcctcctggccctccaggtgtg

SEQ ID NO: 43374 - DNA, 201 bp, Homo sapiens
cttttcctcaaagggtgacccaggagtcggggtcccgggctcccctgggcctcctggccctccaggtgtgaaggtaagtcaatgccccatcaccagttgtrggggcagcaggccgggcccccacaggaggaagagggagttctgatgagagtcctgggaggggtcctgcattgaccattccctccctttgctgtttttatt

SEQ ID NO: 43375 - DNA, 201 bp, Homo sapiens
agagggagttctgatgagagtcctgggaggggtcctgcattgaccattccctccctttgctgtttttatttcagggagatctgggcctccctggcctgccmggtgctcctggtgttgttgggttcccgggtcagacaggccctcgaggagagatgggtcagccaggccctagtggagagcgggtgaggggctgggaacagc

SEQ ID NO: 43376 - DNA, 201 bp, Homo sapiens
tctggatcacagggagccacacactgtcggcttccacactctgagctctgggggccctgtcttggcttctgtgtgcccatccttggtctgtttctcaccayatctgggcacacgtgtgctctggtctgatctcccagatcccaggacacacctgagttcttgtgaacctctccttggtcctgtgtttacaatcctcctttc

SEQ ID NO: 43377 - DNA, 201 bp, Homo sapiens
ctgatccccggtgtcctgttggtctccagggagaccctggagtagggctgcctgggccccgaggcgagcgtggggagccaggcatccgggtacgtatgtcwtactccacagccgaactcccttcatcccagctcttgcctctgatttccaacctctgagtcaatgaacctaatgtcaccatccagggtgaagatggccgcc

SEQ ID NO: 43378 - DNA, 201 bp, Homo sapiens
gagccctgttccctgcccttgacccttttctctagggtcttgctggccctgcaggaccccaaggaccttctggcctgaaggtgagtctaggtgtgtggatrggaggaggaggctccttcaagctgtgtccatgcctggggtagtgtgcgccaacctcctgggctgtcatctcctgcaatgaggatgagctccaggagccct

SEQ ID NO: 43379 - DNA, 201 bp, Homo sapiens
attctctgcagggtctaccaggagagcgtggtatggctgggcctgaagggaagccggtgagtggtggctgaagcacctggccccaggctccggaccctccrctaggtgctgctgctgctgtgtgtgtgcatgtctgtgtgtgtgtgtttgtgtgtacctgtgtctgtgtgcctctctgtgtgtgcctgcttgtgtgtgcct

SEQ ID NO: 43380 - DNA, 201 bp, Homo sapiens
gctcccaggagtctccagccatgcctcaaccaagtgctaaagggtgctctgggcaagaggcctagggaaaagggtgtgaaggtgctttcctgaggccgtgyggggcagaaggcaggagcttctctgtcatgggcagcccttcacccagactttgtccccagaatgtggatcggttgctggaaactgctggcatcaaggtgg

SEQ ID NO: 43381 - DNA, 201 bp, Homo sapiens
cagggcctcctggagagaagggagaccctgggcggcctggccccccaggacctgttggcccccgaggacgagatgtaagaggctggagtcgggggagtcayggcgggtaagggagtagggctgttgccagcatcatgggggttcttggaaccagggctgactctcatgtttcacagggtgaagttggagagaaaggtgacg

SEQ ID NO: 43382 - DNA, 201 bp, Homo sapiens
tctggcccttgtgaccctttgattacccccatcctcaccatgacgcctcagttctcccaaaatccttgaaatccaattggaccccatgaccctcatcactyctggtatctttgggagtgaggtgtggcccagggtcatggggtcgtcatctgttttctagggtgacaaaggcgatcgtggggagcgggtaagtgagggaca

SEQ ID NO: 43383 - DNA, 201 bp, Homo sapiens
ggagaaggtaggaacgtggggaaggtcctggcatgagtgggggggtgagtggatcttgtatgatattagaattcaggcgcggggcctccccagtttgggcrggactcacactcttttgcccaatagggtgatgttgggagtgcaggactaaagggtgacaaggtgagtgtgggcatggggagggcagggcaggggccaggg

SEQ ID NO: 43384 - DNA, 201 bp, Homo sapiens
gccgctgggccctctgggccgaatgtgagtcttggtagtcctgcctggttgtccccttcccctaccccttcacatgaggaccctagaccccagcctcattkgttggtcttggccttgacgagctctggggcgagacctgttgtctgtgtcttctcccagagccctgcctgggtggggcatgttcttgccatgcaggcctta

SEQ ID NO: 43385 - DNA, 201 bp, Homo sapiens
atgagctgagattcagcatcccctggaggagtcggggtctcagcagaaccccactgtccctccccttggtgctagaggcttgtgtgcacgtgagcgtgcgwgtgcacgtccgttatttcagtgacttggtcccgtgggtctagccttcccccctgtggacaaacccccattgtggctcctgccaccctggcagatgactca

SEQ ID NO: 43386 - DNA, 201 bp, Homo sapiens
cctggtgcagcagggatccctggtgacccggtaagatgcccctgctcccacaggggccccctgtccccagagggcccccgtcaccatggtggtcccaccastgtggtagcttttgaccttatagtgacccagtgctctcatggtgtcctcatgtcacccagggtcccccacctccacagtagccgcctatgatggtgtccc

SEQ ID NO: 43387 - DNA, 201 bp, Homo sapiens
ccggacaagtcatcggaggtgaaggacctgggcttcctgggcggaaaggggaccctggaccatcggtaagtgcagggtatgtggaggcaagtgatgtgtastggggggaccaacacgaggggggcgagagtgaggtctgtggggttgcaccttatactttgtctcctccatcagggcccccctggacctcgtggaccactg

SEQ ID NO: 43388 - DNA, 201 bp, Homo sapiens
accatcactggcccctttcatcctatgtccttgtcttgcactcacttttttcagccatatcccagctctctggtccccaccaccccacatccccacccccmtggcccttctcactctgcgtccctgtccatcactgccatcgtcccacatccctgtctctttctgacccctgcccacctaccctgacttctctcttagggg

SEQ ID NO: 43389 - DNA, 201 bp, Homo sapiens
cctgggccccacatccatcctcctttcctggaacttggtgcctgaggcccgtggctaccggttggaatggcggcgtgagactggtcagtgcgggggaaggratggacaggcaagggtcagggcatggcctctgctggtctgaccctgttatcttgcaggcttggagccaccgcagaaggtggtactgccctctgatgtgac

SEQ ID NO: 43390 - DNA, 201 bp, Homo sapiens
ggcccttctcactctgcgtccctgtccatcactgccatcgtcccacatccctgtctctttctgacccctgcccacctaccctgacttctctcttaggggtkgagcggaccctggtgcttcctgggagtcagacagcattcgacttggatgacgttcaggctgggcttagctacactgtgcgggtgtctgctcgagtgggtc

SEQ ID NO: 43391 - DNA, 201 bp, Homo sapiens
ggcagtggggacacaccagaaaggggctcccaggagtctccagccatgcctcaaccaagtgctaaagggtgctctgggcaagaggcctagggaaaagggtstgaaggtgctttcctgaggccgtgcggggcagaaggcaggagcttctctgtcatgggcagcccttcacccagactttgtccccagaatgtggatcggttg

SEQ ID NO: 43392 - DNA, 201 bp, Homo sapiens
cctcctcagggcttccctggagcagatgggcgtccaggcagccctggccgcgccgggaatcctgggacccctggagcccctggcctaaaggtgagcaagcyttgtcctgcaggtcagggtgggcgctgcctgagtgggtggggtggctccgactgttctgcctctggcctccatttgcagggctctccagggttgcctggc

SEQ ID NO: 43393 - DNA, 201 bp, Homo sapiens
cagtggggacacaccagaaaggggctcccaggagtctccagccatgcctcaaccaagtgctaaagggtgctctgggcaagaggcctagggaaaagggtgtsaaggtgctttcctgaggccgtgcggggcagaaggcaggagcttctctgtcatgggcagcccttcacccagactttgtccccagaatgtggatcggttgct

SEQ ID NO: 43394 - DNA, 201 bp, Homo sapiens
agtgtcagtggggcaggagaggttggcagcacaggtctcactgattacccttcctagggcctgagaggacaagttgggcctcctggcgaccctggcctccyggtgagtgtcccccacatctgtccctgcaccctgactggcttatccccacctaactgctatcttctttcagggcaggaccggtgctcccggcccccaggg

SEQ ID NO: 43395 - DNA, 201 bp, Homo sapiens
cgacccatagtttacccaccctcatgaccctcagctttcatagtagaccgcatatttaagctctggccccatgcctccctccggagtctcatctttctgtkactgatgcctgtgttgcctcctgacctctgtcaacagggagccaaaggtgaccgaggactgccagggccgcgaggcgagaaggtgaggtgggttggccct

SEQ ID NO: 43396 - DNA, 201 bp, Homo sapiens
cctctgacctcttgctgtccctcaggcatctgccctgcgggagatcgtggagacctgggatgagagctctggtagcttcctgcctgtgcccgaacggcgtygaggccccaagggggactcaggcgaacagggccccccaggcaaggaggtgagcagaagtggctcagtgggttgtgccccgtggagtggggtgtagctgta

SEQ ID NO: 43397 - DNA, 201 bp, Homo sapiens
cttggtgcctgaggcccgtggctaccggttggaatggcggcgtgagactggtcagtgcgggggaagggatggacaggcaagggtcagggcatggcctctgytggtctgaccctgttatcttgcaggcttggagccaccgcagaaggtggtactgccctctgatgtgacccgctaccagttggatgggctgcagccgggcac

SEQ ID NO: 43398 - DNA, 201 bp, Homo sapiens
ggtgaccccatttgaacccacataacccctgccagttactctggcccttgtgaccctttgattacccccatcctcaccatgacgcctcagttctcccaaartccttgaaatccaattggaccccatgaccctcatcactcctggtatctttgggagtgaggtgtggcccagggtcatggggtcgtcatctgttttctaggg

SEQ ID NO: 43399 - DNA, 201 bp, Homo sapiens
tggccaggaacagtcccgggtcctggggcccgagctcagcagctatcacctggacgggctggagccagcgacacagtaccgcgtgaggctgagtgtcctarggccggctggagaagggccctctgcagaggtgactgcgcgcactggtaagcctgcctcaccttggcgtgctcctcccctgctgatgacccaccctgactt

SEQ ID NO: 43400 - DNA, 201 bp, Homo sapiens
cgctgaggctgcgctgggagccggtgcccagagcgcagggcttccttctgcactggcaacctgagggtgagaggtgtccccaggaggaagttagggaccaktgggggcagggctgtggcagactccgcaaggtaggcgaggacagtgatggtgggcggggtctgtcactgggggtctgcgggatccgtgacagtaggtaag

SEQ ID NO: 43401 - DNA, 201 bp, Homo sapiens
tccgccggggtgagtactgcaggaggcttgtggaggacagctgcctgcctcactctggtcctggttctgacttctgacttctgtctgtaactcctagagcyggaaactccacttgctgttccagggctgcgggttgtggtgtcagatgcaacgcgagtgagggtggcctggggacccgtccctggagccagtggatttcgg

SEQ ID NO: 43402 - DNA, 201 bp, Homo sapiens
aggtccggagtccagccagacactgcccccagactctactgccacagacatcacagggctgcagcctggaaccacctaccaggtggctgtgtcggtactgygaggcagagaggagggccctgctgcagtcatcgtggctcgaacgggtcaggccctgcccccgtcccttggctctctgcctccattgctctttcagacccc

SEQ ID NO: 43403 - DNA, 201 bp, Homo sapiens
agttcctgcccacacggtgtaccctgacctagaccccggaccccaatccccacttggcagtgctgattccatcctatgtgctcctgaccccgaccccaacyctgcatcatacatgcccaccccaatcctcctgcctgatcccctgatcccgcattcccagcggatgactcgacctctgctccacgagacctggtgctgtct

SEQ ID NO: 43404 - DNA, 201 bp, Homo sapiens
ccatcactggcccctttcatcctatgtccttgtcttgcactcacttttttcagccatatcccagctctctggtccccaccaccccacatccccacccccawggcccttctcactctgcgtccctgtccatcactgccatcgtcccacatccctgtctctttctgacccctgcccacctaccctgacttctctcttaggggt

SEQ ID NO: 43405 - DNA, 201 bp, Homo sapiens
caggcgaacagggccccccaggcaaggaggtgagcagaagtggctcagtgggttgtgccccgtggagtggggtgtagctgtacagccaccagcattctctyttccactcctgcagggccccatcggctttcctggagaacgcgggctgaagggcgaccgtggagaccctggccctcaggggccacctggtctggcccttgg

SEQ ID NO: 43406 - DNA, 201 bp, Homo sapiens
caggtcagaggtcgtggttttggagggggtggttggagtttgggaccccttgtctggggtttgacgttcaagccccgccaccaaccctctctctctctgtmtttctctcaccctctctcttcagggtgaccggggctttccagggcccctgggtgaggctggagagaaggtaagtgcaacctggggggtgccaagggccct

SEQ ID NO: 43407 - DNA, 201 bp, Homo sapiens
ttgggggattcaggtgtgaggggtgctactctgggctccccatggtgttaggggaggctggaagataaggagataagagttccctccaggtcagaggtcgyggttttggagggggtggttggagtttgggaccccttgtctggggtttgacgttcaagccccgccaccaaccctctctctctctgtctttctctcaccctc

SEQ ID NO: 43408 - DNA, 201 bp, Homo sapiens
tactctgggctccccatggtgttaggggaggctggaagataaggagataagagttccctccaggtcagaggtcgtggttttggagggggtggttggagttwgggaccccttgtctggggtttgacgttcaagccccgccaccaaccctctctctctctgtctttctctcaccctctctcttcagggtgaccggggctttcc

SEQ ID NO: 43409 - DNA, 201 bp, Homo sapiens
tgtttcctgcagggcagagatggccctcctggactccctggaacccctgggccccccggaccccctggccccaaggtgatcaccccatccctgccttagtyctgtgactagtgaccaggaagccacccttagcttggtccccagaaatatggtagtgtgtgccataaccctggaatttctgaccctataaccctctgtgat

SEQ ID NO: 43410 - DNA, 201 bp, Homo sapiens
tcacagcctggtcccatctgttgcacataggggcggccagggcctgccggtcctcgaggcgagaagggagaagctgcactgacggtgagtgtgggcctggrtgggcctgggagggcctgggtgggcctgggtgggctggggccctacctccctcacccagcaccctgacccctgggccctggctccatgcagtctcaccat

SEQ ID NO: 43411 - DNA, 201 bp, Homo sapiens
agctactcagtgcgagtgactgcacttgtcggggaccgcgagggcacacctgtctccattgttgtcactacgcgtaggcagagcatgcgctggagagcttyggatgggtggtgtggatggtttggggatccgggcttgtgctctggattggagaaaggaccaggattggtagtgagcctttgggggcagggtctgagagga

SEQ ID NO: 43412 - DNA, 201 bp, Homo sapiens
accccttccctgctgtcagcggtgactctgtgacttctgggcggggactgagctgtatgacttccaattccatgtgacctccattccaatgaagactttgrtcatacaaccccaaggcagggccaagctgtatctgtcctgtttgttttcagggacctgctgttgctggacccaaaggagaaaaggtaagcctggtatggg

SEQ ID NO: 43413 - DNA, 201 bp, Homo sapiens
aaattctccagttttgtcttctaagtctttgcatatattaatcagctattcattttttccaactttatttcttttaaccttttagaaatacaccttataawgccctactccttaaacttttccacttgtatcttgtaagaacaaggacatttttctaaaataaactaaaatgttgtcactctcaagaaatttgacattgat

SEQ ID NO: 43414 - DNA, 201 bp, Homo sapiens
aaagtggagccaaagagtgaactgaactctctgctcttccattcccttctttctgggaactgtggcctcatattttagctttggtgtctttaaaaaggttytttgtagggagtatttagtgaattttttgtgttgtttttttttttttttttttttttttttttttttgagacagtcttgctctgttgcccaggctggagt

SEQ ID NO: 43415 - DNA, 201 bp, Homo sapiens
acagtgagctgtgatggtcccactgccctccagcctgagtgacagagagaggccctgtcaaaaaacattttgcaagatctgtatcacttttttaaaaaatygtatataaagtacaagttatttttaataaacaggtaattacaaaagacactttaaaaatattcaaacagccaggtgcagtggctcatgcctgtaatccca

SEQ ID NO: 43416 - DNA, 201 bp, Homo sapiens
caacccagagggtttgaagggctaatgagagcacttttgttgattcctttacttgctcccaagtgtagggaagtaaatgctactaaggaaaatttgtgggrttttgttagtatctgtagggtctcaggtgagtaagctatgcttccttttaaaactcttacccctctttcctatacagactttttgtcgatggttagaaaa

SEQ ID NO: 43417 - DNA, 201 bp, Homo sapiens
ctgtgcccagtgacatgtattatttttgtccaagtatgtaatatgtgatgatcagatcaaatcaggtgatgatcaaattgagatatccatcacctcaaacstttatcatttctttgtgtagggaacattctaaatcttctctttcagctattttgaagtactcaataaattattaactatagtcactctgttttgctgtgt

SEQ ID NO: 43418 - DNA, 201 bp, Homo sapiens
ttgtatttttagtagagacagggtttcaacgtgttggccaggctggtcttgaactcctgacttcaagtgatctgcccgccttggcgtcccaaagtgctggrattaacaggcatgagccactgcacccggctctctcttatttcttaatctagcttaagctttgtcaattttgttgttgttgttgttaattttgaaatactt

SEQ ID NO: 43419 - DNA, 201 bp, Homo sapiens
aattgcaatgattatgaagcttttcccctaggctttcttctaagagttttatagtttcaggtcttacgtttaggtctttagtcctttttgagttaactttyatatgtgatataagggactaactttgttctttttcaggtgaatattcagttttcctagcaccattgtgtagtcttggcacccttgacaaagatcatttga

SEQ ID NO: 43420 - DNA, 201 bp, Homo sapiens
aaactccttcattttctttctaaagacaaaaaacttctggactttgtgaatccagctgtcattttacacacacctgcatacacacacacacagccacgcgygcacacacacacacactttcctattaaagagaaattactaaaggggaaagagtgcttggtctttgggaagttgagactagaatttatctgatgttcctgc

SEQ ID NO: 43421 - DNA, 201 bp, Homo sapiens
gttatattgaaaaatatttttaggtagtgatggttatcttatgtgcccctcagtttatttttttcttaattagtatcctttcaaaccatttttcttcccaytgtccgagaaaattatcaagaagtaatttgttgtaacaaatctagcaatttatctcgttttgtaaaattctcataaaggattagataaaagaagttaagg

SEQ ID NO: 43422 - DNA, 201 bp, Homo sapiens
gctcatcctatcactgcttagtcttgccatctgacccttggttgttttattcttgtaaaatgaagtcactggagtaagtagattaatgattcataacccaraggtaaattgcaagctgatatatccccagcagtgacgcagagtattgcgggaagcaagggataaaggagctgagttcctgccaggaaggagggctcacac

SEQ ID NO: 43423 - DNA, 201 bp, Homo sapiens
tcctgccaggaaggagggctcacacacaagacaatgcagtgtgcctggcaaaacacttgactagatcatctctacagtcctctgtaggttttaactgttcrtgctgttgcgatttcatgtttcacctcaaccttctctttgagaagcttagcatcctttagatataatcagtttcggaataaagaatgtttgggattttaa

SEQ ID NO: 43424 - DNA, 201 bp, Homo sapiens
acaactatgtagttcagccaaaattcatttgtcagaggtcattatgatataggattatttaaaaatgcttgtctcagaacttctgggatttcaaagaatcygggaagaccccactgtgcagtgctgtcattggccttattgattcctttcttttattttgattcaatttcagtttattttagagatagggtttcactctgt

SEQ ID NO: 43425 - DNA, 201 bp, Homo sapiens
tgtgaccaacaactatgtagttcagccaaaattcatttgtcagaggtcattatgatataggattatttaaaaatgcttgtctcagaacttctgggatttcraagaatccgggaagaccccactgtgcagtgctgtcattggccttattgattcctttcttttattttgattcaatttcagtttattttagagatagggttt

SEQ ID NO: 43426 - DNA, 201 bp, Homo sapiens
taactcaggttatgtgtactgtgtgaaagttgagtagaatggtaaagtataatataacctgaaatcatttttaaaatggaatttataatttttaatattaytgtaaaagcagttcaggaaagtactcattgggacctagttaaagtgagctgtcttacagaaccacagaatataaaattgataataataatatataacaga

SEQ ID NO: 43427 - DNA, 201 bp, Homo sapiens
agactcccaaagtgctaggattacagacatgagtcactgtgcctggccaaggctctctttaagtggtcactaaatggcatttgtaaccaaaagtaatgtgygtggtggtttttttctttccggaagattttgtctactggaacaaaagcgtgttttaactgtagtaataactatagtgttttaacatccatttgaaattgg

SEQ ID NO: 43428 - DNA, 201 bp, Homo sapiens
gaccatgctccacctagggagaggagagcacctagggtgcagattttaaggaggtcctggccttaagaatgagttccccctggccaggtgcagtgcctcaygcctgtaatcccagcactttgggaggccgaggtgggtggatcacgaggtcaggagttcaagaccagcctggccaagatggtgaaaccccatctctactaa

SEQ ID NO: 43429 - DNA, 201 bp, Homo sapiens
actcaggttatgtgtactgtgtgaaagttgagtagaatggtaaagtataatataacctgaaatcatttttaaaatggaatttataatttttaatattactrtaaaagcagttcaggaaagtactcattgggacctagttaaagtgagctgtcttacagaaccacagaatataaaattgataataataatatataacagata

SEQ ID NO: 43430 - DNA, 201 bp, Homo sapiens
ccaagatctatcattctagtcattttataaatacaccatcacctttcccctccaatttggtcagacttcagcatggttgtatgcagctgcttctcctcttrtcagatctaggtgctttgcatctctcaatcttctgaaatttctgggaccttgatcttttggtttatcctatgtcttgtctgcatctttagactcctttac

SEQ ID NO: 43431 - DNA, 201 bp, Homo sapiens
catacggctgtgcgatacaccagcattgaattggttggagagatgagtgaagtcgttgatcgaaatcctcagttccttggtatgtgtaatctctctcctcygccacttctaacttgtcatttttctgatttttcttctcatctcttacttttgcatgtgttttcctttctgtttttttaacacggagtgtttatagaaact

SEQ ID NO: 43432 - DNA, 201 bp, Homo sapiens
tttaaaaaggtgatgtgttactagttattgtcaacagatatctttctctcagttggtgcaatgttttccttttataattaggagagccctattaacatgcyattctgagaacctattaacagtaacccttatttcacagtaaatgaaagaaaatctgaaatagatgtaaatacttgaattaaagttaaatttttattaagt

SEQ ID NO: 43433 - DNA, 201 bp, Homo sapiens
gtgttaatcagtcttagccttctgagcccaataaagaataaagaaaaaacaactgtaaataacaaagtgttgtcattttaaaaaacaatgctgatcttttwaaaagaatggaaccaaaccagttcgctttttctggtcactcacatgatgtagtccagttaagttacctcaattcagcgtttatttttcatttgtatcttc

SEQ ID NO: 43434 - DNA, 201 bp, Homo sapiens
cacgtgctgttctcttaattttaatgttagtattgtgtttgagtcatggtattttgtatctccacacaaccttagtcatgatttagtctggtggttttcaractgcacccacccccgctattttttaaagtgaagaatccaactgggcgtggtggctcatgcctgtaatcccagcactttgggaggccgaggcgggtggat

SEQ ID NO: 43435 - DNA, 201 bp, Homo sapiens
tcctgtgactctcggcctgttttctgttatcacatacaagacaacgtttatttgttttacataatgttacgaggatacctagatttgaatggaacccaaarcatttctgggagaatgtaacaccacgcagttatcactcctttaaacagtaccatatggaaaagaggctacgagtaaaatcccaggctttttctccctttc

SEQ ID NO: 43436 - DNA, 201 bp, Homo sapiens
tgatcagattctcattacaatctttttcttttcccagctgtgcttttcttctttgttccttttgtacttattgtaataaatatttggcaagtctgaatgcygtggcatttctgaaaaagcatttcttttaaaatcactgttttgttttaggcactgtgcatccccacctttcagctcctagaacagcagaatggtctccag

SEQ ID NO: 43437 - DNA, 201 bp, Homo sapiens
actctggagctgctgcttatctgtgcaggccatcctcaatatgaggtagtgtttatgctattcaaaggccattattctccaagttgtgtgctgcatattayctatatttcattacctcgtgcccaaatttttattgttgagaaattacagtcttgtttttaattaatgtgatttcatctgttttggaattttttaaaaaaa

SEQ ID NO: 43438 - DNA, 201 bp, Homo sapiens
tcatttgaacccggagggtggaggttgcagtgagctgagatcgtgccactgcactccagcctgggtgacagagtgaaactccatctcaaaaaaaaaaaaaagaaaaaagaaaaaaagaatgagttcccccttaaattctgcatcataggtgccctcaaccacaggcacaggcatgctggtgcggtgttggtacttggataa

SEQ ID NO: 43439 - DNA, 201 bp, Homo sapiens
gaatgtctatagtctgttgtttctgacttcttttcttttctttttttttagtttttaaaggttaactcttaaatttcagcaatttgtagctaacccaaaaragtttacatcagatgtatagaattggaggttgggagaaatgggggaagggggttagtcttagttgtcatattgtttggaagaaatgtttctttgcttccc

SEQ ID NO: 43440 - DNA, 201 bp, Homo sapiens
gtttcatattaatcctctaaccttgttatttctctggcttttagatttttatttataagatgggtatcactgctgctttgattattccatataaaactgtrtgtgcatccggtgagatatttaattgtagcttatatctgttgtatttctgcattctttgattcatgttttatgcttcctgccctaattttcacacctttg

SEQ ID NO: 43441 - DNA, 201 bp, Homo sapiens
tggagactaattaagccagctgttacctgaagttctggggcaaaggcaaattctaagaattcattcctggtaggtctttgtgttaaaatactctttaaaaagtggaaggccgggagcgatggctcacacctgtaatcccagcacctgggaggccaaagcagacagattgcttgagctcaggagttcgacaccagcctgggc

SEQ ID NO: 43442 - DNA, 201 bp, Homo sapiens
taacatagaattatgttattaacctttgttagattaaatgaaacttatctaaaattttaaatactactgaaatatattgtgtgggatgtaaaagactagtratttatgtaacacacacttcttgaattaattgcagcaaagtcttttattgccttgtggatcactctcactaactggcatgacagccattttgtaaaaata

SEQ ID NO: 43443 - DNA, 201 bp, Homo sapiens
gagaaagtgtgcttgaggtggtgggattatggtttggttttatacacttcagggatgtaggagttacaggcaaatacataaatcaaaatatggaaggtatacattggtttagtctaaaaagatgggctgtcttgaagtgggggcttacaagtcataagtggattcagagattctttaatctgcagttggttaaaggaacaa

SEQ ID NO: 43444 - DNA, 201 bp, Homo sapiens
cctcccaaagtgctgggattacaggcgtgagccacctcatccagcttggataacttttttaaaaattatttttatttttttggagacacagtcttgctgtktcacccaggctggagtgcagtggcacagtcatggctcactacaacctcagcctcgacttcccgggctcaagtgatcctcccacctcagcctcctgagtgg

SEQ ID NO: 43445 - DNA, 201 bp, Homo sapiens
acctaggctaatacgtaatcctttggatttggggaaggtgtttcagcagttggtggggttagaatggggattgcagcaagagggaggctgagtaggaaggrtctggaccttctgtctccacttgaacctaactgcctcttttggtttttctttttaacctattttattggagttctaagtcaagatttgtttaggagggaa

SEQ ID NO: 43446 - DNA, 201 bp, Homo sapiens
gttcaagatatagtctgtggaacaccaaccccatgagatattttttgccaaaaaaaagttattaattaaaattaggaaatggtataaatagtatattaaargctctgtgaagttgtataataagagagctgtttaattttgcctttcctagcagtgtctgttatttcactataaaaatattatttagtcacattctgtagg

SEQ ID NO: 43447 - DNA, 201 bp, Homo sapiens
ctttgacttaatttacaaattatgtaaattatcaatgttgttcaagatatagtctgtggaacaccaaccccatgagatattttttgccaaaaaaaagttahtaattaaaattaggaaatggtataaatagtatattaaaggctctgtgaagttgtataataagagagctgtttaattttgcctttcctagcagtgtctgtt

SEQ ID NO: 43448 - DNA, 201 bp, Homo sapiens
tttcaccttgttagccaggatggtctcgatctcctgacctcatgatccatccgcctcggcctcccaaagtgctgggattacaggtgtgagccaccgcgccyggccaattccctagcttttttagttggtcaacttgaagaaagctgggacgtttcagtctaaaataacattcttgctttccaaatgccagatgaacctatc

SEQ ID NO: 43449 - DNA, 201 bp, Homo sapiens
gaattctttcctctacattaataatggttctagctatataccgcccttaggataattaagaagatgggcactcagataattttctgaagggcttaattctrtacaattttttttttttgtagatatagagcttctctatggtctcaaacctggtctcaagtgatcctctctccttggcctcccttaatgatgagattacaa

SEQ ID NO: 43450 - DNA, 201 bp, Homo sapiens
tttttttctggctttgtctttttgaagtatgatggactcatgttcatttaggtccaaccaggtgtctcctttccaagtttcagaatcccattctttaccaktcagtttcctaactttcacatgagaagtgtggagggactgtaaattcacctgttgtttgtaattcagcaagtcacacaactaagtttggtatacgagttt

SEQ ID NO: 43451 - DNA, 201 bp, Homo sapiens
cttccccagctgtttcttcccacctttagagttgtttagacaaggaggagtaagcaaggaacttgttctgctttctatcgtggtcacattggtgatgctcrggacctgccagggtcagaatttatggatatctgaaccctgaccccgttcattctctcagtccacttccaatccacatcagtttgttgtctgccttggaga

SEQ ID NO: 43452 - DNA, 201 bp, Homo sapiens
gccctcctgacacatcatcccttgtttccacagcacactcagcattggaagcacactgcagacggtgtctcattaaagcagtagctcccttgaacccacargttaaaacgccagacttttatttatttgtttattttttctgagttcttattggcagacttcagaatgaggtacctgaggaaatatagaaacctctgcctt

SEQ ID NO: 43453 - DNA, 201 bp, Homo sapiens
ctgttatatgtggtgccagtctcctaaaactgaccctccagatgtaatgagcaaagagcttattcttatcacttttatgacctgaatgctgaagtgccagrttttgaccagggcaggaggtatgaattgaatatcccttatccgaaatgcttgggatttcggaggaaaaaacactttcagaagtgtttttcaattttggat

SEQ ID NO: 43454 - DNA, 201 bp, Homo sapiens
aggacgatagcttgagcccagaggttcgagcagcctgggcaacacaatgagaccctgtttctatctgttctgaaaacaaaacaaaacagaagtctcttgargaagggtaaaatttaaaacatgtaagacattaggatagcaaaaaaatctcggtctccagcactgtcctaactttcagggttttctgttatcctagtccct

SEQ ID NO: 43455 - DNA, 201 bp, Homo sapiens
cagtggcacatgcctgtagtcctgcctgggcaatgtagcaagaccctctctcttaaaaggaaaaaaaaaaacagtgacacttaaacttaaaaagcactttyaaccgttggctgttttattgccatctttctcattattatacttgtaaggtgattgaaataatggtttaaatatatagattaacattattcattttaagtt

SEQ ID NO: 43456 - DNA, 201 bp, Homo sapiens
acacctggccatgtcacattttattttgctgtatgtttggaccatgactttctggtacaactttcccccaacagctcttaaaaaaaaaaaaaaaaaaaaamcctaaaaattaaaatacttcatatatacaaaagaataagtatgaacacttactatttatttatttatttttgagacagagtctcctccctctgtcgccca

SEQ ID NO: 43457 - DNA, 201 bp, Homo sapiens
gccggagtgcagtggcaccatcttggctcactgcaacctccgcctcctgggttcaagcaattctcttgcctcagcctcccaagtagctgggactacaggcrcatgccaccatgcccggctaatttttgtatttttagtagagattggggttttgccatgttggccaggtttgtctcaaactcctggccttaagtgatctgg

SEQ ID NO: 43458 - DNA, 201 bp, Homo sapiens
tttccttttgattatatatttagctcttatggagatggctgtgaaaatgtaagttgactgaacttacctctataagggaacttttttgcttctagaaaatrtatttatgtatacccaagtgtattttgtgaatctgggagcttgctaggagatttatgattacttttcttttacaatttttttttttttttttggaggatg

SEQ ID NO: 43459 - DNA, 201 bp, Homo sapiens
ccatgtcacattttattttgctgtatgtttggaccatgactttctggtacaactttcccccaacagctcttaaaaaaaaaaaaaaaaaaaaaacctaaaawttaaaatacttcatatatacaaaagaataagtatgaacacttactatttatttatttatttttgagacagagtctcctccctctgtcgcccaggctggag

SEQ ID NO: 43460 - DNA, 201 bp, Homo sapiens
tattggctctaattttcctaaagcaaatgggaacctaggggaaaccctccaaagatggggtttggagtcaagtatgttggtttgaatcttgccacataccstattactttgaacttcagtttatttatcaagtgaaatagggttagtactaccagtctcataaggttattatgagataccaaatggaaatctaaagaagat

SEQ ID NO: 43461 - DNA, 201 bp, Homo sapiens
ttcctcttttttgaagatttgaaaatctttcataacaaataccaagtacttttatcttaatggttgtttagaaagaagccctttagcaatgctgtgtgtcrtcacagcctgttatttggccagaatataacctctgaaatcagtaactgtgagtacttaccgcctgtactcagggaaaacaatccaacacttgtggaagtc

SEQ ID NO: 43462 - DNA, 201 bp, Homo sapiens
ccttctgattcctttacctcttcattctctttagccacctggtcacacaatcacaccctggatcttgtctttactaaaaagccaccacccaggctgggcgygcagtggctcacgcctgtaatcccaacactttgggaggctgaggcgggcggatcgcttgaggtcaggggtttgagaccagcctggccaacatggtgaaaa

SEQ ID NO: 43463 - DNA, 201 bp, Homo sapiens
accacagaaggtagttgtgattaaatgagttaatattctacgaagaggttagaaaagttcttggaacatagagattaaaatgttagcaattgttatttaartattagtcacttttctctccttactttccaatactctattacaaccttacatcatcttcaccatcacagttaatagtcagagtccagacaggaacagatg

SEQ ID NO: 43464 - DNA, 201 bp, Homo sapiens
caactatgctgggtgtttggatttggaaatgaaccagacaaaaatctctgcttaccacagaaggtagttgtgattaaatgagttaatattctacgaagagsttagaaaagttcttggaacatagagattaaaatgttagcaattgttatttaagtattagtcacttttctctccttactttccaatactctattacaacct

SEQ ID NO: 43465 - DNA, 201 bp, Homo sapiens
tggactcaagagtctagaatcaagtggaaaaaccggaaaaaaggccaggaacctgaatacgacctaatagctgtttccgagggggcaacttccacggagavccttctgccctggtaacggccaaagaggaggagatggcgccagtcagggagcggccgtggcccagacagtgaggaagcgcgaaggcggagcaaccgagga

SEQ ID NO: 43466 - DNA, 201 bp, Homo sapiens
acattagtttaatttcaggcagttttcatattgctgtattatattctaatgagctctgaaataccactttggaagctttgtcacagcaatactaaactaacctaatttttttttttttggtaactcagtcattttttgtatatttgggtgtaatatgatctaaaaagtattaataaaagtataactattttcattatatta

SEQ ID NO: 43467 - DNA, 201 bp, Homo sapiens
aacattagtttaatttcaggcagttttcatattgctgtattatattctaatgagctctgaaataccactttggaagctttgtcacagcaatactaaactaacctaatttttttttttttggtaactcagtcattttttgtatatttgggtgtaatatgatctaaaaagtattaataaaagtataactattttcattatatt

SEQ ID NO: 43468 - DNA, 201 bp, Homo sapiens
taacattagtttaatttcaggcagttttcatattgctgtattatattctaatgagctctgaaataccactttggaagctttgtcacagcaatactaaactaacctaatttttttttttttggtaactcagtcattttttgtatatttgggtgtaatatgatctaaaaagtattaataaaagtataactattttcattatat

SEQ ID NO: 43469 - DNA, 201 bp, Homo sapiens
tagcttattttttaaataaaatttttattggggaaattgatacatgctccttgaaaaaattctaacagtatggaaaccttcaaagtgcaaaatgaaccccrtcctctctccctatccttatattttatttttgaaacagggtctcactctgtcacccaggctgaagtgcagtggtgtgatcatggttcactggaacctgca

SEQ ID NO: 43470 - DNA, 201 bp, Homo sapiens
ttaacattagtttaatttcaggcagttttcatattgctgtattatattctaatgagctctgaaataccactttggaagctttgtcacagcaatactaaactaacctaatttttttttttttggtaactcagtcattttttgtatatttgggtgtaatatgatctaaaaagtattaataaaagtataactattttcattata

SEQ ID NO: 43471 - DNA, 201 bp, Homo sapiens
tttgcaaaatttaatgatgatgctttggtatttatgtaacaccttaccatgacaacatactttcagaaactatgctttttaagtttctgtataatcctctwaaggtgacgttatctcttttatgaatgaaaaatggactttagagttacacaactgttaattcagaattggaactaaggccatctcattatttatcttgtg

SEQ ID NO: 43472 - DNA, 201 bp, Homo sapiens
gtgtcagaataggaaagatacagaagtgtttggaataggaaaccatggaatataaatgatctttaaattttttaatgacaaatttcaaatgcacagcaaayataaaataatgtcatagagaatatctgtatacctaccacctaaattccactattcatattttactatgcttgttttttatatctgtccacctacatgaaa

SEQ ID NO: 43473 - DNA, 201 bp, Homo sapiens
catattatctatatttcattacctcgtgcccaaatttttattgttgagaaattacagtcttgtttttaattaatgtgatttcatctgttttggaatttttwaaaaaaattatatttgggtttctgcattgtgtccatttctgttttcttacctggttggctgggctgttgtaggcccctcaaggaactcgttagaaagcaa

SEQ ID NO: 43474 - DNA, 201 bp, Homo sapiens
gtacaactttcccccaacagctcttaaaaaaaaaaaaaaaaaaaaaacctaaaaattaaaatacttcatatatacaaaagaataagtatgaacacttactrtttatttatttatttttgagacagagtctcctccctctgtcgcccaggctggagtgcagtggcacaatctcggctcacggcaaccttcgccctctgggtt

SEQ ID NO: 43475 - DNA, 201 bp, Homo sapiens
cacacctggccatgtcacattttattttgctgtatgtttggaccatgactttctggtacaactttcccccaacagctcttaaaaaaaaaaaaaaaaaaaaaacctaaaaattaaaatacttcatatatacaaaagaataagtatgaacacttactatttatttatttatttttgagacagagtctcctccctctgtcgccc

SEQ ID NO: 43476 - DNA, 201 bp, Homo sapiens
ccacacctggccatgtcacattttattttgctgtatgtttggaccatgactttctggtacaactttcccccaacagctcttaaaaaaaaaaaaaaaaaaaaaacctaaaaattaaaatacttcatatatacaaaagaataagtatgaacacttactatttatttatttatttttgagacagagtctcctccctctgtcgcc

SEQ ID NO: 43477 - DNA, 201 bp, Homo sapiens
ggccaaggtgggcggattgcctgaggtcaggagtttgagaccagtctggccaacatggtgaaacccgtgtctactaaaaatacaaaaaaattagctgggtrtggtgatgtgcatctgtaatcccagccacttgggaggctgaggcaggggaattgcttgaaccagggaggtggaggttgcagcgagccgagattgtggcac

SEQ ID NO: 43478 - DNA, 201 bp, Homo sapiens
ccagctagtgtgactgtgcttttttatatcagattttctttttgtaccttgggtttttgttgtttcccttcataggcacagataaatcagagtcaaatatycttgtcattttctagtggaatttattaaccttgacattgaagtgaggtctaacctgtagtacaatgtggcctcccaattttcagtggtatctaatagatg

SEQ ID NO: 43479 - DNA, 201 bp, Homo sapiens
ctcagtagaagtagtattctgtctacaagctgtttcaggggaaagaagtgtagtagttgcttctctctgcttctgttttgcattattccattcagtgctgkttacagtataagggcaggatcgtattggctctaattttcctaaagcaaatgggaacctaggggaaaccctccaaagatggggtttggagtcaagtatgtt

SEQ ID NO: 43480 - DNA, 201 bp, Homo sapiens
tcttcaattctaatttcagttggttttgttttgttttgttttgttgtgacttggggttccggctgtgttacccagacagactgtagtggccattcacaggygagatcccactacagatcagaatggaattttgacccactctgtttctgacttgggctgttcacccctccctccttaggcaacccaggagtggttcctcac

SEQ ID NO: 43481 - DNA, 201 bp, Homo sapiens
ggtgatctacccgccttggcctcccagagtgctgggattacaggcgtgagccaccacacccagcccatatttgggtttataaagggaaaaatggaaaagayagccatagtgcctcacagcccatctacccaaagttggattgaatttgcgtgttctattggaagtgacttaaaggtggccaaaaaatgataggatgattta

SEQ ID NO: 43482 - DNA, 201 bp, Homo sapiens
ttaaggaggtcctggccttaagaatgagttccccctggccaggtgcagtgcctcacgcctgtaatcccagcactttgggaggccgaggtgggtggatcacraggtcaggagttcaagaccagcctggccaagatggtgaaaccccatctctactaaaaatacaaaaaattagccgggcgcagtggcaggcgcctgtagtcc

SEQ ID NO: 43483 - DNA, 201 bp, Homo sapiens
ttaataatggttctagctatataccgcccttaggataattaagaagatgggcactcagataattttctgaagggcttaattctatacaattttttttttttgtagatatagagcttctctatggtctcaaacctggtctcaagtgatcctctctccttggcctcccttaatgatgagattacaaacgtgaaccaccacacc

SEQ ID NO: 43484 - DNA, 201 bp, Homo sapiens
cttgaacctgggaggcggaggttgcagtgagccaagattgcaccactgcactccagtctgggcaacagagggagactccatctcaaaaaaaaaaaaaaaaraaagaaagaaaaagaaaaaagaaattcattgaaaaataattcttttaagttaaatatatgtttttcacttagccatttattttaaagaaatagttttatg

SEQ ID NO: 43485 - DNA, 201 bp, Homo sapiens
ttacttaagagatctttgcccagatcaatgtcctgcagcatttccctaatgtttgcttgtagtagttttatagttcacatcttacatttaagtctttaatycattttgatttgatttttgtatattatgagagataaaagaaaggattgtctcttaaagatgaactgaaaggtgatagaagattttacttgacctttgagg

SEQ ID NO: 43486 - DNA, 201 bp, Homo sapiens
actgctttacattccagagcgttcccttttctctgcatccttgccagcatttgctattgatcttttgcccattttttaatttttaatttttttttttttttgctattatttgggtttcttatatattgtggttactaatctcttgttggatgggtagtttgcaaatatttcctcccattctgtaggttgtctctttacttg

SEQ ID NO: 43487 - DNA, 201 bp, Homo sapiens
gagccacctcatccagcttggataacttttttaaaaattatttttatttttttggagacacagtcttgctgtttcacccaggctggagtgcagtggcacartcatggctcactacaacctcagcctcgacttcccgggctcaagtgatcctcccacctcagcctcctgagtggatagcttattttttaaataaaattttta

SEQ ID NO: 43488 - DNA, 201 bp, Homo sapiens
tttcaccatgttagctaggatggtctcaatctcctgacctcgtgatccgcccgcctcagcctcccaaagtgctgggattacaggcgtgagccaccgcgccyggcctcgcaggtctttatgacagggacagatctctttgaaattcaaaaagtaattgagcagattctaagctgtgtttcaacctttttttgttttgttttg

SEQ ID NO: 43489 - DNA, 201 bp, Homo sapiens
tgaatccgggaggcggtgattacagtgagctgagatcacaccactgcattcctgcctgggtgacagaaggagattccatctcaaaaaaaaaaaaaaaaaaaaagaaaagaaaagaaaaaacacacataccccacacaaatccagggtgggccattttgtcttagtttttagtatgcctcactatttagatttatctggttc

SEQ ID NO: 43490 - DNA, 201 bp, Homo sapiens
ttgaatccgggaggcggtgattacagtgagctgagatcacaccactgcattcctgcctgggtgacagaaggagattccatctcaaaaaaaaaaaaaaaaaraaagaaaagaaaagaaaaaacacacataccccacacaaatccagggtgggccattttgtcttagtttttagtatgcctcactatttagatttatctggtt

SEQ ID NO: 43491 - DNA, 201 bp, Homo sapiens
tcctctccctcctctcaacctcttacctccagttagtcccagtgtctgtcttctttgtgttcatgtgttctcatcatttaactcccacttataaataagarcatgtggtatttggttttctgatcctgtgttaatttgctaaggataatggcctccagcgccatccatgttcctgcagaggacatgatttcattctttttt

SEQ ID NO: 43492 - DNA, 201 bp, Homo sapiens
tcactcaaaccatctggagatcatacagttaaccctttaatacatatcctctatgaacatatttatggatatatatacagattttttaagcccaaatgaarttatactttacttattcttctgcatcttgctttttcagtcatctgcttaccttttcaagttagtaagttttcatatcatctgataaacccagaccatatt

SEQ ID NO: 43493 - DNA, 201 bp, Homo sapiens
agctcgagaccatcctggccaacatggtgaaaccccgtctctactaaaaacacaaaaattagctgggcgtggtggcatgcagctgtagtcccagctactcrggaggccaaggcaggagaattgcttgaacccgggaggcagaggttgcagtgggccgagatggcaccactgcactccagcctgagcgacagagtgagactc

SEQ ID NO: 43494 - DNA, 201 bp, Homo sapiens
ttaaaaatgaaaagatgaaattacttatttacagatcttttgtctacctagaaaatccaagaaaatgcactaagaatttattaaaattaatgtaatcaaaktagctgcatacaataaatatttcagaattaatagattctcattatatcagtgttaacagaaaaaccaaattttataaaatgttttaaagaggtttgtcct

SEQ ID NO: 43495 - DNA, 201 bp, Homo sapiens
agatggcttttccactagaggggatagtgttgactatatgtacatgcattcttttcttggattatcttaagcctatataattaattaatactacttgcggyatatatagcaccgacctagatttgggtagagacaacatattcaaactaaacacggctgctttttaagttggaagaataaaaagggagaccaaagaagcat

SEQ ID NO: 43496 - DNA, 201 bp, Homo sapiens
cctgtgttgggctatttgatgaaaggcctgtgtgaaaagcccctggcttctgctgcagccaaagccattcataacatttgctctgtctgccgagatcacakggctcagcactttaatggactcctggagattgcccgctccctcgattccttcctgttgtctccagaagctgctgtgggcttgctaaaaggtactcacttg

SEQ ID NO: 43497 - DNA, 201 bp, Homo sapiens
taccttggcagtatccttgtggatgaatatggcatggaagaaggctgtcggcagggactgctagacatgctccaggtatcttttccatgaggagtgtagaygcatcaggcctagagggtctgaaggcctagcagcgtattctttaccatgtctttaattctgttgcttctttatgttttcccccaggcatgttgatttcct

SEQ ID NO: 43498 - DNA, 201 bp, Homo sapiens
acccagatcccagcggaaaggagcgcgcctctttttggcttggggagctgcagcgttcggtgaggggcccagagaggcagttctgtgccgcacggccgggrcggggtggaacctaggctccgggggagaacctgagcccggcagttgacctcgtgaggtcctccttggggaggagctgctgtcgtggggtggggctgcgaa

SEQ ID NO: 43499 - DNA, 201 bp, Homo sapiens
ctccttcattttctttctaaagacaaaaaacttctggactttgtgaatccagctgtcattttacacacacctgcatacacacacacacagccacgcgcgcrcacacacacacactttcctattaaagagaaattactaaaggggaaagagtgcttggtctttgggaagttgagactagaatttatctgatgttcctgcttt

SEQ ID NO: 43500 - DNA, 201 bp, Homo sapiens
tcagggagtgctgacattggagactgcctatcatatggccgtggcacgtgaagatttagacaagtgagtaattgtttaagtctggagccctgggtttaccyacagtctggtcattcttttaagtcactttttattattcgtctgtcatttgtgattctcagtgattctgtaaagtacagatagtgcttcctaaagatgctc

SEQ ID NO: 43501 - DNA, 201 bp, Homo sapiens
ctttcattttagaaatatggtttcattggctttagaattctttcctttttttcttcccattttttagctctacctctccatgtcttctggcatcctcattsttgacaagaagtctgctctagctttttacttttgttcctctgtatttaatgtgtcctttttctctgcttcccttcagtatttctctttatctctggtttt

SEQ ID NO: 43502 - DNA, 201 bp, Homo sapiens
tagaaaatgtatttatgtatacccaagtgtattttgtgaatctgggagcttgctaggagatttatgattacttttcttttacaatttttttttttttttttggaggatgggagttgttttatcactgctttggtgaagatattagctaagtttgatttcatcttggtttctgtgtttcaggccatcttgcaaaagaagtta

SEQ ID NO: 43503 - DNA, 201 bp, Homo sapiens
ttaggagtctactgcttcttacacagattttgacccttttatttatttaaacttttttctttttttgttttaaggctgcattactagccgattccccccccacccttttttttttttttttttttgagacagagtctcgctgtctcccaggctggagtgcagtggcgccatctcagctcactgcaagctccgcctcccggg

SEQ ID NO: 43504 - DNA, 201 bp, Homo sapiens
atctttatgtagttttactaatatttaagttttatttttaaaacaaaattttgtggaaccttttttttcctgttggtaatcaaatacctctttttttttttaacattttgttttctgggtatccacaataagtcaccctcaaatctcagtactgtaaatatcctcattgttcagactggtgatttgttttcttttttggct

SEQ ID NO: 43505 - DNA, 201 bp, Homo sapiens
acgccaccacacccagctaatttttgtattttttagtagaaacggggtttcgccatgttggccaggctggtctctaactccgacctcaggtgatccgcccrcctcggcctcccaaagtgctgggattatagatgtgagccatcgccccccgctgcaactttgactttgaatattaaacctaaaaaactggcacccaagtcc

SEQ ID NO: 43506 - DNA, 201 bp, Homo sapiens
ttttaaaaagatggctgtggcctgcccggcgtggtgggaggggagctggtttcctggtgaactttctaaaaggaaaaataattttaagtaaagaaaaaagraaaaaaaggaagactaaacagaaaccagaactgaaacattcacctggtagcaaatgacacatgcacgcacacacacatacacgcacaagcgccagtgcgc

SEQ ID NO: 43507 - DNA, 201 bp, Homo sapiens
taaatatttggcaagtctgaatgctgtggcatttctgaaaaagcatttcttttaaaatcactgttttgttttaggcactgtgcatccccacctttcagctyctagaacagcagaatggtctccagaatcaccctgacactgtagatgacctgttccggctagccaccaggtaaatccttctgaagagcccatttcttaatt

SEQ ID NO: 43508 - DNA, 201 bp, Homo sapiens
cgtgaggtcctccttggggaggagctgctgtcgtggggtggggctgcgaagctacatctttgccgcttttgggaaactagtcgcacctgatcggtcgcgawctggccctttccccacccggcagaatctgatttgtaggtcttatactcttcgattgtggcatcaatctaatcttgtttaagttctccctttgccgttgct

SEQ ID NO: 43509 - DNA, 201 bp, Homo sapiens
atgttgttgcacaaccaatctcaagaactttttcatcttgtaaaactaaaactatacccattaagcaacaattctccattctcccctctccccatctcctrgcaattaacttcgtacttaatgtttgagtctgactactctagatacctcatataagtgagatcatacagatttgtctttttgtgattagcttacctcact

SEQ ID NO: 43510 - DNA, 201 bp, Homo sapiens
ccaggaactatctttaaacatctcttcctatatagctcgtaccaattcttttcatagcctttcgggaagtctgaagtttaggaaattgtgtatctctgtcwtttagcaaagttagacatgctcttccagttctaaagaggcactgttttctcttgttaagtgatagggttttgtggtgggtagtctattgaacctgagcat

SEQ ID NO: 43511 - DNA, 201 bp, Homo sapiens
agcgcggattttaaaaagatggctgtggcctgcccggcgtggtgggaggggagctggtttcctggtgaactttctaaaaggaaaaataattttaagtaaaraaaaaagaaaaaaaaggaagactaaacagaaaccagaactgaaacattcacctggtagcaaatgacacatgcacgcacacacacatacacgcacaagcgc

SEQ ID NO: 43512 - DNA, 201 bp, Homo sapiens
actcatgcgagttttccccttgctttggagtggcaacataatatgaagaaaaaacagtaattctgctttcagaaaatctttggagttctcattttgtttcrtattaatcctctaaccttgttatttctctggcttttagatttttatttataagatgggtatcactgctgctttgattattccatataaaactgtatgtgc

SEQ ID NO: 43513 - DNA, 201 bp, Homo sapiens
gaggaaacttatgagagccgtagcaaccaagtgttgttgtagcagcctacatttattgaatactattttgttcactgctctattttcataagcactctgtrtgtggacgattttaatcctctaaacagtgttatgaagtagataatattaatagatgaggaaactgagacaaagattggtaacttgttcaagggcacagtg

SEQ ID NO: 43514 - DNA, 201 bp, Homo sapiens
agttatgtttaagaggaaaacagtcttatatgttgatacatgatttacatattaaaatccaaataaccattggtatctttttccttgttttaaaaatatamaattatgtatttcaataatggtcattgaatcctagacatttccatgatataattatgtgtgcatcacaagtttaggaaaaaacagaacaggaagaattaa

SEQ ID NO: 43515 - DNA, 201 bp, Homo sapiens
tctcctgttgactctaaggcagccacccacacattctggaatcccacacattgtagaataagtctttgtcaagccctctttccctcagtgggactaatatwtgacagataaaataatatggtaagtctgaaatcaaggtcatagatatcctttcctaatttaggataaatcttggggcaaggaaaagagacctaagtaaag

SEQ ID NO: 43516 - DNA, 201 bp, Homo sapiens
aaaatacttcatatatacaaaagaataagtatgaacacttactatttatttatttatttttgagacagagtctcctccctctgtcgcccaggctggagtgyagtggcacaatctcggctcacggcaaccttcgccctctgggttcaaatgattctcctgcctcagcctcctgagtagctgggactacaggtgtgtgccacc

SEQ ID NO: 43517 - DNA, 201 bp, Homo sapiens
tttgataattcattatctagataatggttactttgtattgtctgtttctttctagttgttgtcacttggttttgctttttttttccccccgacgtggtctygctctgtcatctaggctggagtgcaatggtgtgatcaaggctcactgcggccttgacttcctggctcaaataaatggacctcccaccacagcctccaaag

SEQ ID NO: 43518 - DNA, 201 bp, Homo sapiens
catctaggctggagtgcaatggtgtgatcaaggctcactgcggccttgacttcctggctcaaataaatggacctcccaccacagcctccaaagtagctggyattacaagcatgtaccaccacatctggctaatttctttttttctttcttttttgtgtagagacgaggtctcactttgttgcccaggttggtcttgagctc

SEQ ID NO: 43519 - DNA, 201 bp, Homo sapiens
taagaatgcagcaatgttccttccttgctacgaggtaccaaattagaagtatcagttttaatactcctaataggatatagttatgtttaagaggaaaacartcttatatgttgatacatgatttacatattaaaatccaaataaccattggtatctttttccttgttttaaaaatataaaattatgtatttcaataatggt

SEQ ID NO: 43520 - DNA, 201 bp, Homo sapiens
ctcataaggttacaatcatcatcattccatatcacttaacattagtttaatttcaggcagttttcatattgctgtattatattctaatgagctctgaaataccactttggaagctttgtcacagcaatactaaactaacctaatttttttttttttggtaactcagtcattttttgtatatttgggtgtaatatgatctaa

SEQ ID NO: 43521 - DNA, 201 bp, Homo sapiens
ggcgtgatcatggctcaccgcaacctctgcatcctgggctcaagcagtactcccacctcagtgttcctgcccacaccccccagtagctgggactacagacrtgccatcatgcccagctatttcaccttgttgcccagactggtcctgaactcctagggctcaagcagtcttcctgcctcagtctcccaaagtgttgggatt

SEQ ID NO: 43522 - DNA, 201 bp, Homo sapiens
cagagagggtgaactggtttagtttcatttcagcaagtccaagcctgcttttcacatggtactggtaattaattccctagcttttttttttttttttttttgagacggagtctcgctctgtcgcccaggccggactgcggactgcagtggcgcaatctcggctcactgcaagctccacttcccgggttcacgccattctcc

SEQ ID NO: 43523 - DNA, 201 bp, Homo sapiens
gccttaaagagaagaagccaatctatctctgaatttcttcctggagacagcttcgtaagttggtactttttgaaggacgaagcattgaactaattgttttktccctcaacagatggtgaatgtgtaccacgtacatcagcattcctgcttcctgtaccttggcagtatccttgtggatgaatatggcatggaagaaggctg

SEQ ID NO: 43524 - DNA, 201 bp, Homo sapiens
tagaatgtatgtttgatttaatttgcagaatttcatcttttcaaagagattagttttagaaacaggtttttttcagaatttggtctttcagtttgagtcartagttagaatgtacaagcaaatccttccacttgtacacatcatgtcttattaaaattgaaatatcattcaggaagtctaaaggccaagtgattatgtaat

SEQ ID NO: 43525 - DNA, 201 bp, Homo sapiens
ttagtagagacggggtttcaccatgttggttaggctggtctcaaactcctgaccttgtgatccacccacctcagcctctcaaagtgctgggattacagccrtgagccaccacacccggcccctgccattcttccttctataaatacttggatatttactctgtgcctcttgtggctttagatagtgacagatgtctcagaa

SEQ ID NO: 43526 - DNA, 201 bp, Homo sapiens
ctgaaacaacttgggtaagtctgtaacctctctctacttcagttttcccattgagaaagtagagacaataatagcagctacctataaagttgtatttgggkattgtgttagtccagtctcatgctgctataaagaaatacttgaggctgggctcagtggctcatgcctgtaatcccagcaccttgggaggccaaggtgggc

SEQ ID NO: 43527 - DNA, 201 bp, Homo sapiens
atctttgtagttgagattagttaaacatcgtatatgcaaaatggatttgggtttttgagattagtagaataagtactaatgtctttttatatacttgtgcrtttcttctttaagctttgaaagtagcagtgcctagtaatatagtcttggtagataggagttagggagtgattagaataagattacattttagaacaagaa

SEQ ID NO: 43528 - DNA, 201 bp, Homo sapiens
ttccttcaatgaagatatattagtatggaagctgcatgtattgtgaatgtatgccgatgcgctattactcagaagatagtaccatgatgctagattgatgmcactgtgaattaaagaaaagaaagacatttttcaaggagacatttggcatgtcattggtgtgtatttctgtgtcatttttgcatcagaagctaagcctta

SEQ ID NO: 43529 - DNA, 201 bp, Homo sapiens
gtttaaccattatgagatggaaagtgtgttttcatctgcattgaatccttggctgtaggcactggtatctgagttagttgagccagggagagggctacagsaaggcaagcatattaagaattgcttcctggctgggcgcggtggctcatgcctgtaatcccagcactttgtgaggccgaggcgggcggatcacaaggtcag

SEQ ID NO: 43530 - DNA, 201 bp, Homo sapiens
acttgactgttacacatttaaagtacatgttcagaaagaggctataattgaaagaaagaaagaggctctaattgttttcctattacatttatccatcactrtcttcaaaggattggttccaggaccacccactacccctgcccctctgtgcacagtttccaagagatgcagatgcccaagtcccttatataaaatggtgca

SEQ ID NO: 43531 - DNA, 201 bp, Homo sapiens
gtctgaaatcaaggtcatagatatcctttcctaatttaggataaatcttggggcaaggaaaagagacctaagtaaagcagtgctgtgggggaaaaaaaaaacctgttatctttgtcctgtgatatgggaaaataaggtgcaccaccaacctgacctacttgatcttccattgctaaacaagttttgcagctcttcctatag

SEQ ID NO: 43532 - DNA, 201 bp, Homo sapiens
tttaatcttctttaattttttgaagaaccatcatactgttttccatagcagctgcaccattttacattcccactagcagtgcacaaagttccaatttctcyacatcctcaccaacacttgttattttctgggtttttgagagtagccatcttagcatttcacaccaagtgtgaagtgatatctcattgccgttttcatttg

SEQ ID NO: 43533 - DNA, 201 bp, Homo sapiens
gcttccttttaaaactcttacccctctttcctatacagactttttgtcgatggttagaaaattccttaaaaggtttgccaaaggaaacaaccgtgggagcygtcacagtgacacacaaacaacttacagacttccacaagcaagtcactaggtgagtgatactgggggttcttaaggaggtgtgggatgtgggaagaaaca

SEQ ID NO: 43534 - DNA, 201 bp, Homo sapiens
ggacaacaattaaactgaaaataagaacccagaggaagtctgtagaatttttattttagaaaggaaggaagtaaagggagtagacaatttttgtgcatagraaaggcataaagagaattcttagatatacttatataaaaaatatataagtaaattaaacagcaacaagagcaaggttttttaacacaaagaacaggcaga

SEQ ID NO: 43535 - DNA, 201 bp, Homo sapiens
ctttttggcttggggagctgcagcgttcggtgaggggcccagagaggcagttctgtgccgcacggccggggcggggtggaacctaggctccgggggagaayctgagcccggcagttgacctcgtgaggtcctccttggggaggagctgctgtcgtggggtggggctgcgaagctacatctttgccgcttttgggaaactag

SEQ ID NO: 43536 - DNA, 201 bp, Homo sapiens
ctcaacagatggtgaatgtgtaccacgtacatcagcattcctgcttcctgtaccttggcagtatccttgtggatgaatatggcatggaagaaggctgtcgkcagggactgctagacatgctccaggtatcttttccatgaggagtgtagacgcatcaggcctagagggtctgaaggcctagcagcgtattctttaccatgt

SEQ ID NO: 43537 - DNA, 201 bp, Homo sapiens
accttaattgtattcacttctgtgtcttctgtgaatgttccatcttatttcttcaattttagtggctgaatgagataatagatatgcaagtgcctagcacrctgcctggcatatagtagctatgtttatttaacattttacaagtcagttgcagtttatggatgattcggttatggtttactctgtatgcttgcactgatt

SEQ ID NO: 43538 - DNA, 201 bp, Homo sapiens
cctttttatgtctacacctcctttcttccatactgagaatccaggttgtgagggacacagaaggtgacagagtatcttataattactcagtagctctgtcycacattaacctagtcagtagcctcagactaacaatactaacactactactatcagtatatacaccaaaaacaagcatagttttgcatgtgctctcccctt

SEQ ID NO: 43539 - DNA, 201 bp, Homo sapiens
gaacccgggaggtggagcttgcagtgagccgagattgcaccactgcactccagcctgggcgacagagcgaggctccgtctcaaaaaaaaaaaaaaaaaaaagattgttttggccacttggggacccttgaaattccatatgaattttagggtagatttttctgtacaagaggttgttgggattttgatggggattgtattg

SEQ ID NO: 43540 - DNA, 201 bp, Homo sapiens
acaaatatctctttcagcccctgctttcaattcttttggatacccagaggtagaattgctggatcatatggtgattctatttaatcttctttaattttttkaagaaccatcatactgttttccatagcagctgcaccattttacattcccactagcagtgcacaaagttccaatttctccacatcctcaccaacacttgtt

SEQ ID NO: 43541 - DNA, 201 bp, Homo sapiens
tttttatgtctacacctcctttcttccatactgagaatccaggttgtgagggacacagaaggtgacagagtatcttataattactcagtagctctgtctcmcattaacctagtcagtagcctcagactaacaatactaacactactactatcagtatatacaccaaaaacaagcatagttttgcatgtgctctcccctttc

SEQ ID NO: 43542 - DNA, 201 bp, Homo sapiens
gctatgtttatttaacattttacaagtcagttgcagtttatggatgattcggttatggtttactctgtatgcttgcactgattgctgttccacttgtacasctggaatagaagatcatagataagcattaaagcctctaggatacttatagggaatttggacctagccaggaacaataggcaagtgtttctgctttagtaa

SEQ ID NO: 43543 - DNA, 201 bp, Homo sapiens
gattgtgccactgcactccagcctgggtgacagagtgagactctgtctccaaaaaaagaaagaaaataattgaaggatgtgaaatatttacttgagccaasatagtttttctgctattttgtcgggaactaataattgaaatgtagggctactgagaccaatatgaagtatattctcatatttatagatatattaaaacag

SEQ ID NO: 43544 - DNA, 201 bp, Homo sapiens
ggcatagaagtgcccttaaagaggaggcttttcttaagtcttcaagatgacaaatgcaaagagaagggaaatggcaatccattacttgagaactgagtcaraggtctgactttattagtagctttgacctttggcatagtataatttatatgtctgtgaagttctgtggtattgccaaataaaagtaaatattgatatatt

SEQ ID NO: 43545 - DNA, 201 bp, Homo sapiens
tctaagccaagatcagagcaagtcagaatagtactaagtttgttagtagacaactaagcagtgggagtagtaaagtgcttcacaggaatttcgaaggtagktttgattagatgtggagtagaattgtagacaggggagagcagtgaagaagtaagtattctgcattctatttaggctattcatttaagaagtttggcagta

SEQ ID NO: 43546 - DNA, 201 bp, Homo sapiens
tcatacttcttgcttccctattcctgctacctccccagcaacaggataagacctcgtctaacctacatgaagctgcttcggactgtgtatgctcagctctstatgccattgagaatgtggagactaacttgccattagccatgcaactttttcagggagtgctgacattggagactgcctatcatatggccgtggcacgtg

SEQ ID NO: 43547 - DNA, 201 bp, Homo sapiens
aggcctgatcaataccagcagaatatttttgacaaagctagtgacttcgttttcctcagtgatgacatacttcccctctacttttttcactgaaggttatrtgaggatcaaaagtcatgttttaagaattgcttttgagacttcagaggacaaattacatcaacactaaatactcttaagtgtccaatggtctcaaatgat

SEQ ID NO: 43548 - DNA, 201 bp, Homo sapiens
tgttgagaaattacagtcttgtttttaattaatgtgatttcatctgttttggaattttttaaaaaaattatatttgggtttctgcattgtgtccatttctrttttcttacctggttggctgggctgttgtaggcccctcaaggaactcgttagaaagcaagcctttccaatgaaccccttgtctagcttgacttattctct

SEQ ID NO: 43549 - DNA, 201 bp, Homo sapiens
cttacctggttggctgggctgttgtaggcccctcaaggaactcgttagaaagcaagcctttccaatgaaccccttgtctagcttgacttattctctagagygttacagctaaaaaacaccaaattctaactatacctccacaagtcttaacacccccaatttttctccaaatgatggatgagaatgacaaagggattgaaa

SEQ ID NO: 43550 - DNA, 201 bp, Homo sapiens
tttagtagagacggggtttcaccttgttagccaggatggtctcgatctcctgacctcatgatccatccgcctcggcctcccaaagtgctgggattacaggygtgagccaccgcgcctggccaattccctagcttttttagttggtcaacttgaagaaagctgggacgtttcagtctaaaataacattcttgctttccaaat

SEQ ID NO: 43551 - DNA, 201 bp, Homo sapiens
ggcaggagttcaaaaccatcctgagcaagatggcaaggccctgtttctactaaaaaaaaaaaaaaaaaaaaaaattagctgagcttggtggtgtgtacctrtagtcccagctacttgggaggctgaggcaggaggatcacttgagctcaggagtttgaggcagcagtgaactgtgttcattccactgcactctagctgggg

SEQ ID NO: 43552 - DNA, 201 bp, Homo sapiens
cagttttatactagattttatactagttcagtttaatatgcaacattggggtttttgttctgttttattttctaaacataaacacagaaacacaatacaartgtataacttagtgaattactatatgtggatgtccttttagccaccacccaagtcaagaaacatcttcatttgtctgaagatgttttctgatttcccttc

SEQ ID NO: 43553 - DNA, 201 bp, Homo sapiens
gcccagctggacattttcatcataccagaaagagacctgtaccccttggcctgccacctcccacctcattgctaggcagctactaatctactttctgtctstagagttttgcctattctggatatttcatataaatggaatcatatagttcatgatcctttgtgactgtcttctttcagttagtatgatgttttcaaggtt

SEQ ID NO: 43554 - DNA, 201 bp, Homo sapiens
ccctgtttctactaaaaaaaaaaaaaaaaaaaaaaattagctgagcttggtggtgtgtacctgtagtcccagctacttgggaggctgaggcaggaggatcrcttgagctcaggagtttgaggcagcagtgaactgtgttcattccactgcactctagctggggcaacagaatgaaactccgtctctaaaaaataaataaaa

SEQ ID NO: 43555 - DNA, 201 bp, Homo sapiens
tgatgtgtctgtaggcactttactggcattcagaagattaaggagcagtatgcttttcctgaaacaatatctttcatttctatcttttcctcttttttgargatttgaaaatctttcataacaaataccaagtacttttatcttaatggttgtttagaaagaagccctttagcaatgctgtgtgtcatcacagcctgttat

SEQ ID NO: 43556 - DNA, 201 bp, Homo sapiens; identical to SEQ ID NO: 35416

SEQ ID NO: 43557 - DNA, 201 bp, Homo sapiens
cctcaactccccaaccccacttcctctgcctgcccctcctcctccttccacgttgtctcctccacctagcagttggttggcaaccccttcctcagtcccckgctgaaaaccctccagtcagcgcttatcccttctgctctctcccctcacccagagaaatacatggagtttgaccttaatggaaatggcgatattggtgag

SEQ ID NO: 43558 - DNA, 201 bp, Homo sapiens; identical to SEQ ID NO: 35318

SEQ ID NO: 43559 - DNA, 201 bp, Homo sapiens
ccccacttcctctgcctgcccctcctcctccttccacgttgtctcctccacctagcagttggttggcaaccccttcctcagtcccctgctgaaaaccctcsagtcagcgcttatcccttctgctctctcccctcacccagagaaatacatggagtttgaccttaatggaaatggcgatattggtgagaaacgggtgatttg

SEQ ID NO: 43560 - DNA, 201 bp, Homo sapiens; identical to SEQ ID NO: 35319

SEQ ID NO: 43561 - DNA, 201 bp, Homo sapiens; identical to SEQ ID NO: 35418

SEQ ID NO: 43562 - DNA, 201 bp, Homo sapiens
ttgtggtagcaaaaggggaacctgcctttattgccctcctgccacactgcggtccctttcccgggcctgcctctctcagcatcccctctagctccttacamcctagcggggcccctcaactccccaaccccacttcctctgcctgcccctcctcctccttccacgttgtctcctccacctagcagttggttggcaacccct

SEQ ID NO: 43563 - DNA, 201 bp, Homo sapiens
agaggcctccagcttggtctgtctccccacctctaccagcatctgctgagctatgagccaaaccagggatttacagggtagggagggtgggataggcagcrgcattagatcggaggaatgagatggacagacctgggctgtgggctaggagggcagtcagctggcctagggtagcccgggctggtgtcagggtaaggagag

SEQ ID NO: 43564 - DNA, 201 bp, Homo sapiens; identical to SEQ ID NO: 35411

SEQ ID NO: 43565 - DNA, 201 bp, Homo sapiens
caccccgaggagccgccaccgctgtcgcccgggggaccgtactacgcctgcgtgcgtcgcactacggatgcgtggacacttaagcatcgccccaccccctcccccctctggcggcgttcacgtctgtgcgcgcgcttgagcgctagaagattgaggtggctaccgtaaatgcctgaaaaacagtcaccagctgggactcta

SEQ ID NO: 43566 - DNA, 201 bp, Homo sapiens
ctttgcaaacattactattaattatagcaaatatatactttggacttaccatgtgcaagtctttgctaagggctttatgtgcattatttcatttaatcctrtaagattgatgatttgccaattttacagatgaaaaaacagacatagcagttaggggttggtggtgttttgtttgtttggagacagagtctctgtcgccca

SEQ ID NO: 43567 - DNA, 201 bp, Homo sapiens
attgcagcctcgacatcccaggctcaagcaatcctccctcctcagcctccctagtagctgggactacaggcgtgtgccaccacatcggctaatttttgtaytttttgtagagacagagttttgccatgtagcccaggctggttttgaactcctgggctcaagccatccgcccaccttggcctctcaaagtgctgagattac

SEQ ID NO: 43568 - DNA, 201 bp, Homo sapiens
ctacttctatggtattatccttaactccatctaccagtgccctgagcacagtcaactgacaactctgggcgtggatgggaaggaggtatggactgagattrggggaagcctatggtggaggctctgagggacttgggtggatggcctaggatgactggagaccatcttgggaaaggaagagaggaagggggtgtgagtgtt

SEQ ID NO: 43569 - DNA, 201 bp, Homo sapiens
atataaaaaactagctgggcatggtggtgggcacctgtagtcccagctactcacgaggttgaggcaggagaatggcgtgaacccgggaggcagagcttgcrgtgagccgagatggcgccactgcactccagcctgggcaacagagtgagactctgtctcaaaaaaaaaaaaaagaagctgggacactatggttggggtgat

SEQ ID NO: 43570 - DNA, 201 bp, Homo sapiens
agcaaatggagtccgagtggacagaaagacaagaccctgaccgtggggaatttaaaggccggccagcgtgcttccgaaggccgggggtggaggcattacckcctctccgtgccctcttctcttaacctgccctgggccaagggcctcggccccgcgaaactgcgagtcctccagaaagacacatcgctgttggggtgtcca

SEQ ID NO: 43571 - DNA, 201 bp, Homo sapiens
tcaagtccctgacttcctgcctggactccaaagccttcttattgactcctaggaatcaaggtaaggggttaaaatctcataaaacaggattaggactcacmaagtcttctggtgttacagggtgaaagaggctcgtgtgatgtcaccagagggatgtggctaagagctgtgatgtcacctgagggaggcaggatgggttct

SEQ ID NO: 43572 - DNA, 201 bp, Homo sapiens
acccgggaggtggagattgcagtgagccaagatcgcgccactgcactccagcttgggcaacagaacgagactcccatctcaaaaaaaaaaaaaaaaaaatkcaaacattacaccaaaatagaacagtattaataaactctaatatactggtcacccaaattttgtttgttttttaactaaatcgcaagcctcagccctcgg

SEQ ID NO: 43573 - DNA, 201 bp, Homo sapiens
ttggcaattcttactgcctattatttgagaacttattacccaccagaaactaagtgctttgcaaacattactattaattatagcaaatatatactttggamttaccatgtgcaagtctttgctaagggctttatgtgcattatttcatttaatcctataagattgatgatttgccaattttacagatgaaaaaacagacat

SEQ ID NO: 43574 - DNA, 201 bp, Homo sapiens
taccagcgctttctcctctacagtgagtagggatacaaggcaggaagggttggagggaaacaagggagggcaggagaactcctcactctgggtcctatgayaccctcccaggaagagctaggtgcttccaggggttttgactggcctgaccccaccttgcccttccagatcgctcaccacatcctcccgaaaagtgtgtgg

SEQ ID NO: 43575 - DNA, 201 bp, Homo sapiens
tcaccacatcctcccgaaaagtgtgtggaggaattcaagtccctgacttcctgcctggactccaaagccttcttattgactcctaggaatcaaggtaaggkgttaaaatctcataaaacaggattaggactcaccaagtcttctggtgttacagggtgaaagaggctcgtgtgatgtcaccagagggatgtggctaagagc

SEQ ID NO: 43576 - DNA, 201 bp, Homo sapiens
gtgagactctgtctcaaaaaaaaaaaaaagaagctgggacactatggttggggtgatgctcattctttcctccttgccaccaccacctctgcaggaaagaygggctctgtgtgccccggaaatggatctaccacctgactgaagggagcacagatctcagaactgaaggttggttcttcccagccctcaccctcccttgag

SEQ ID NO: 43577 - DNA, 201 bp, Homo sapiens
tgaatgagacaggccagggttaccagcgctttctcctctacagtgagtagggatacaaggcaggaagggttggagggaaacaagggagggcaggagaactmctcactctgggtcctatgacaccctcccaggaagagctaggtgcttccaggggttttgactggcctgaccccaccttgcccttccagatcgctcaccaca

SEQ ID NO: 43578 - DNA, 201 bp, Homo sapiens
tactttgggatcattgccctgtgaggaggacgaacatccaaccttcccaaacgcctcccctgccccaatccctttattaccccctccttcagacaccctcmacctcttctggctcaaaaagagaattgggggcttagggtcggaacccaagcttagaactttaagcaacaagaccaccacttcgaaacctgggattcagga

SEQ ID NO: 43579 - DNA, 201 bp, Homo sapiens; identical to SEQ ID NO: 36339

SEQ ID NO: 43580 - DNA, 201 bp, Homo sapiens
ggagagagatgggggagataaggagagaagaagatagggtgtctggcacacagaagacactcagggaaagagctgttgaatgcctggaaggtgaatacacrgatgaatggagagagaaaaccagacacctcagggctaagagcgcaggccagacaggcagccagctgttcctcctttaagggtgactccctcgatgttaac

SEQ ID NO: 43581 - DNA, 201 bp, Homo sapiens
gggtgtctggcacacagaagacactcagggaaagagctgttgaatgcctggaaggtgaatacacagatgaatggagagagaaaaccagacacctcagggcyaagagcgcaggccagacaggcagccagctgttcctcctttaagggtgactccctcgatgttaaccattctccttctccccaacagttccccagggacctc

SEQ ID NO: 43582 - DNA, 201 bp, Homo sapiens; identical to SEQ ID NO: 36347

SEQ ID NO: 43583 - DNA, 201 bp, Homo sapiens
gagatggggaagagagagagagaaagatggagagacaggatgtctggcacatggaaggtgctcactaagtgtgtatggagtgaatgaatgaatgaatgaaygaacaagcagatatataaataagatatggagacagatgtggggtgtgagaagagagatgggggaagaaacaagtgatatgaataaagatggtgagacaga

SEQ ID NO: 43584 - DNA, 201 bp, Homo sapiens
gctcactaagtgtgtatggagtgaatgaatgaatgaatgaatgaacaagcagatatataaataagatatggagacagatgtggggtgtgagaagagagatgggggaagaaacaagtgatatgaataaagatggtgagacagaaagagcgggaaatatgacagctaaggagagagatgggggagataaggagagaagaagat

SEQ ID NO: 43585 - DNA, 201 bp, Homo sapiens; identical to SEQ ID NO: 36342

SEQ ID NO: 43586 - DNA, 201 bp, Homo sapiens
tccactctcccacccaaggggaaatggagacgcaagagagggagagagatgggatgggtgaaagatgtgcgctgatagggagggatggagagaaaaaaacrtggagaaagacggggatgcagaaagagatgtggcaagagatggggaagagagagagagaaagatggagagacaggatgtctggcacatggaaggtgctca

SEQ ID NO: 43587 - DNA, 201 bp, Homo sapiens
agggttagtaccggtatggaagcagtgggggaaatttaaagttttggtcttgggggaggatggatggaggtgaaagtaggggggtattttctaggaagttyaagggtctcagctttttcttttctctctcctcttcaggatcatcttctcgaaccccgagtgacaagcctgtagcccatgttgtaggtaagagctctgagg

SEQ ID NO: 43588 - DNA, 201 bp, Homo sapiens
gggacctctctctaatcagccctctggcccaggcagtcagtaagtgtctccaaacctctttcctaattctgggtttgggtttgggggtagggttagtaccrgtatggaagcagtgggggaaatttaaagttttggtcttgggggaggatggatggaggtgaaagtaggggggtattttctaggaagtttaagggtctcagc

SEQ ID NO: 43589 - DNA, 201 bp, Homo sapiens
tcttctgcctgctgcactttggagtgatcggcccccagagggaagaggtgagtgcctggccagccttcatccactctcccacccaaggggaaatggagacrcaagagagggagagagatgggatgggtgaaagatgtgcgctgatagggagggatggagagaaaaaaacgtggagaaagacggggatgcagaaagagatgt

SEQ ID NO: 43590 - DNA, 201 bp, Homo sapiens; identical to SEQ ID NO: 36354

SEQ ID NO: 43591 - DNA, 201 bp, Homo sapiens; identical to SEQ ID NO: 36356

SEQ ID NO: 43592 - DNA, 201 bp, Homo sapiens
acctcagggctaagagcgcaggccagacaggcagccagctgttcctcctttaagggtgactccctcgatgttaaccattctccttctccccaacagttccycagggacctctctctaatcagccctctggcccaggcagtcagtaagtgtctccaaacctctttcctaattctgggtttgggtttgggggtagggttagta

SEQ ID NO: 43593 - DNA, 201 bp, Homo sapiens; identical to SEQ ID NO: 36357

SEQ ID NO: 43594 - DNA, 201 bp, Homo sapiens
agcgatcctcctgccttagcctcccaagtagctgggactacaggtgcatgccaccatgctaagttttgtatttcttttttgttttcctcgagacagtttcrttcttgtcgcccagactggagtgcaatggggcgatcttggctcactgcaacctacgcctcgcaggttcaagcgattctcctgcctcagcctctcaagtag

SEQ ID NO: 43595 - DNA, 201 bp, Homo sapiens
tgtgggtggcggggactggcagccgttctatctacctacttttctgtccacttgtctgtttacaaaggaaaaacaaaggtgacactggagaaaccgacacrtttgaggttctaaaaattaaacgagccacaatataaacagtctcacatcttggtacctcaccaaatgtcccctcattttttcctgtttttacgactttcg

SEQ ID NO: 43596 - DNA, 201 bp, Homo sapiens
cctcagcctcctgagtagctgggattacaggcgcgtacgaccatgcacagctaatttttatgttttagtagagacagggtttcaccatgttggccagggtkgtcttgaactcctgacctcaagtgatcctcccacgtcggcctcccacagtgctgggattacaggcatgagccaccatgcccgaccaatagttcatgtctt

SEQ ID NO: 43597 - DNA, 201 bp, Homo sapiens
ctgggctgtgggtggcggggactggcagccgttctatctacctacttttctgtccacttgtctgtttacaaaggaaaaacaaaggtgacactggagaaacsgacacgtttgaggttctaaaaattaaacgagccacaatataaacagtctcacatcttggtacctcaccaaatgtcccctcattttttcctgtttttacga

SEQ ID NO: 43598 - DNA, 201 bp, Homo sapiens
gtggcacggtcttggctcactgcagcctctacttcccaggctcaagcgatcctcctgccttagcctcccaagtagctgggactacaggtgcatgccaccakgctaagttttgtatttcttttttgttttcctcgagacagtttcattcttgtcgcccagactggagtgcaatggggcgatcttggctcactgcaacctacg

SEQ ID NO: 43599 - DNA, 201 bp, Homo sapiens
gggccttgggttggacaagcttgtggtgaactgtcttccaaagtggctgcagcatcttgcattctcaccagcagtgaacaagggttgctattgctccagaycctcaccagcatttggtgttgtcagtgtttggatgtttgccattctgataggtgtgtgtggcatctcattgttctagtttgcatttccctgctgacatat

SEQ ID NO: 43600 - DNA, 201 bp, Homo sapiens
ctcagctaatttttgcaattttaatttactttatttttaaatttaatttttgtatttttagtagagacagggtttcaccatgttggccaggatggtctctyttgaccttgtgatccactcgcctcggcctcccaaagttctgggattacgcaggtgtgagccaccgtacctggcccttttttttttatttttaagacaagg

SEQ ID NO: 43601 - DNA, 201 bp, Homo sapiens
tccctgtgtagcccaggctggtcttgaactcctgggtacaagcagtcctccctcgtgggcctcccaaagtgctgggattacaggcgtgggctcccgtgacyagcctggaacgtgctgatgagcctctttttctcctgaaaccccggtgggaacagatggtggatgcttccaaaagcatcgaagctgtccatgaggacatcc

SEQ ID NO: 43602 - DNA, 201 bp, Homo sapiens
cttccacgggagaggagaccctggcgtgtgtgtggcagaaaagacactgccaaggacctcgtgcctgtgtccggacccagctgctctgtgctgcaggcgtyctaggccgggggtctccaggggttctgtacatagactgtttgctcctggccagcaggcctgtagctgcgctgggagggcctccatggggcctgggctgtg

SEQ ID NO: 43603 - DNA, 201 bp, Homo sapiens
tgccttctacgcccctggcagattttctagaatttgctgtcccagaagcttgagaagggtccggtgccacccgacagcagaagccgggatgccgctgagaygccagcgcttctgagtccctctcactgcctgccttctggtggagagaaggctgtcctgcgggcttatgccctccccacgctcctcgcaccgttcacgcca

SEQ ID NO: 43604 - DNA, 201 bp, Homo sapiens
gcgtgtgtgtggcagaaaagacactgccaaggacctcgtgcctgtgtccggacccagctgctctgtgctgcaggcgttctaggccgggggtctccaggggytctgtacatagactgtttgctcctggccagcaggcctgtagctgcgctgggagggcctccatggggcctgggctgtgggtggcggggactggcagccgtt

SEQ ID NO: 43605 - DNA, 201 bp, Homo sapiens
ccacttgtctgtttacaaaggaaaaacaaaggtgacactggagaaaccgacacgtttgaggttctaaaaattaaacgagccacaatataaacagtctcacrtcttggtacctcaccaaatgtcccctcattttttcctgtttttacgactttcgaaacaaaaacctagactacactaagctttaactgttgggttctttct

SEQ ID NO: 43606 - DNA, 201 bp, Homo sapiens
tcccctcattttttcctgtttttacgactttcgaaacaaaaacctagactacactaagctttaactgttgggttctttcttggcagaatttttccctagaytggtgtaaacagccagacgtgggccttcccaaacccgacctggtcctgttcctccagttacagctggcggatgctgccaagcggggagcgtttggccatg

SEQ ID NO: 43607 - DNA, 201 bp, Homo sapiens
accacagtgtgccaggaggttcaggttggccttccagagcccggcctgtgtgaaatccccacgagcacagaggacagaacgaaacatggtgttgttttgaracagggtgttactgtgtcacccaggctggagtagagtggtgccacattttttgtagagacggggtgtccctgtgtagcccaggctggtcttgaactcctg

SEQ ID NO: 43608 - DNA, 201 bp, Homo sapiens
agaagagcaaacatttatgtagctagagattgtttcacagatagaaccatagttggtatttggattatattttccacacgcttttttttttttttttggggagacagtctctcattctgtcacccaggctggagtgcagtggcacgatctcagctcattgcaacctctgcctcctgagttcaagcgattatcctgcctcag

SEQ ID NO: 43609 - DNA, 201 bp, Homo sapiens
ccaggctggagtacagtggaacaagcaaagctcgctataacaactcttgggcccaagtgatcctcccgcttcagcctcccaaagtgctgggattacaggcdcgagccaccgtgcccggccacgccctcactttttaattctgccatttcttcatgtgttagcttgagtccttcccctctgaagtattacgttgtataataa

SEQ ID NO: 43610 - DNA, 201 bp, Homo sapiens
tgtggcctgcagtcacagcctttctggtcctacctttcctccggaaacaggacagcatttggagggagatgggatgagtaagggagggagagagggtgctsgcacagccctggcaagaagggccagtggatgagactaggctggcacataacaggctctaggagtgcctgtcttcttcctgctcttccacgggagaggaga

SEQ ID NO: 43611 - DNA, 201 bp, Homo sapiens
agagaagccgctgggggagctatggaagtgacccaaggctgcccactggagacgcctctccctgcagtcccccgagaggtgggagactcgcggaaggcccygtccccagcggagtccagaccccacaacttcaggagctctttcccggcagcagagatctgcaggctgcctcttctgccccggagctggggtgcactgggg

SEQ ID NO: 43612 - DNA, 201 bp, Homo sapiens
gcaggctggccgcctctgctcctcccgaccgcagcccctacctctctcccagactccagtcgcccgtgcccaccgctgcccacgtggcctctttccaggcrgcagccagggcttctggcacgtcgggcgccagcactgtcgcttgtggccacggcccgcggagcttcagtcccttgagctcctcctccagagcagggccga

SEQ ID NO: 43613 - DNA, 201 bp, Homo sapiens
cgaagctgtccatgaggacatccgcgtgctctctgaggacgccatccgcactgccacagagaagccgctgggggagctatggaagtgacccaaggctgcccactggagacgcctctccctgcagtcccccgagaggtgggagactcgcggaaggccccgtccccagcggagtccagaccccacaacttcaggagctctttc

SEQ ID NO: 43614 - DNA, 201 bp, Homo sapiens
ctgggggagctatggaagtgacccaaggctgcccactggagacgcctctccctgcagtcccccgagaggtgggagactcgcggaaggccccgtccccagcrgagtccagaccccacaacttcaggagctctttcccggcagcagagatctgcaggctgcctcttctgccccggagctggggtgcactggggacccccgtgg

SEQ ID NO: 43615 - DNA, 201 bp, Homo sapiens
agaggtgggagactcgcggaaggccccgtccccagcggagtccagaccccacaacttcaggagctctttcccggcagcagagatctgcaggctgcctcttytgccccggagctggggtgcactggggacccccgtggtggggaccttggcagtgtggacatgagcagagcgatggagcagtctcctgccctctcccctgtc

SEQ ID NO: 43616 - DNA, 201 bp, Homo sapiens
gggataattttctttttctttttttgagatggagtctcgctgtgtcacccaggctggaatgcagtggtgtgatctcggctcactgcaacctccacctcctrggttcaagcaattctcctgcctcagcctcccgagtagctgggattacaggtgcctgccaccatgtccagctaatattttgtattagtagagacagggttt

SEQ ID NO: 43617 - DNA, 201 bp, Homo sapiens
tcacctgctggctgtgcccacgcttcccccgccaccatcctctgctctcttctttgcctgtgctttcttcttcctcgacagggtagagctggcctctctgmccaagacagctgacagtgcatctcctttcccctgccgtgtttctggaacattgaactttaccagttgtgtttgttactatttagtaaggttatcttctcc

SEQ ID NO: 43618 - DNA, 201 bp, Homo sapiens
gtcatgagcatggatgagtcacctgctggctgtgcccacgcttcccccgccaccatcctctgctctcttctttgcctgtgctttcttcttcctcgacaggrtagagctggcctctctgaccaagacagctgacagtgcatctcctttcccctgccgtgtttctggaacattgaactttaccagttgtgtttgttactattt

SEQ ID NO: 43619 - DNA, 201 bp, Homo sapiens
cgggggtctccaggggttctgtacatagactgtttgctcctggccagcaggcctgtagctgcgctgggagggcctccatggggcctgggctgtgggtggcrgggactggcagccgttctatctacctacttttctgtccacttgtctgtttacaaaggaaaaacaaaggtgacactggagaaaccgacacgtttgaggttc

SEQ ID NO: 43620 - DNA, 201 bp, Homo sapiens
tctccggccgtccagcccgcgccgcgtcacctcccctcccggagcgaagggccctgctcgcccgaggacggaggcccgcacgggacacggggccccagttyccgccccggaagcccaggacacggctccagtggcggcgcggcccagggcgcaggcgcgggtgtcggtcccaccgcgcgtcgtcctcgccccggccccggc

SEQ ID NO: 43621 - DNA, 201 bp, Homo sapiens
gatcttggctcactgcaacctacgcctcgcaggttcaagcgattctcctgcctcagcctctcaagtagctgtgatcacaggtgcccaccaccacgcccggctaatttttctattttttagttagtgatggggtttcgtcatgttggccaggctggtcttgaactcctgacctcaggtgatccacctgctttagcctcccaa

SEQ ID NO: 43622 - DNA, 201 bp, Homo sapiens
tgtggggtatcccggaggtcaccacagtgtgccaggaggttcaggttggccttccagagcccggcctgtgtgaaatccccacgagcacagaggacagaacraaacatggtgttgttttgaaacagggtgttactgtgtcacccaggctggagtagagtggtgccacattttttgtagagacggggtgtccctgtgtagccc

SEQ ID NO: 43623 - DNA, 201 bp, Homo sapiens
cgcagccaggggccaacgagagccgacgctgggcgggcagcgtccgggagcccctccgaccctgcgctcccctcgtccgcgccctgaccccgcgtctccgrccgtccagcccgcgccgcgtcacctcccctcccggagcgaagggccctgctcgcccgaggacggaggcccgcacgggacacggggccccagtttccgccc

SEQ ID NO: 43624 - DNA, 201 bp, Homo sapiens
ttttcctaaagcatttttcatcccagcttgtttgcagattgctgttattgctcagagaaattcctttggcttccgcagaagatccaagcctgtctagagawttagtaaagtaaaattcaacgtgagacttgagtccgggagaaattcagtccaaactatattgtaatatagagggaaagcctgatctcacttgcattttgt

SEQ ID NO: 43625 - DNA, 201 bp, Homo sapiens
aagccgggatgccgctgagatgccagcgcttctgagtccctctcactgcctgccttctggtggagagaaggctgtcctgcgggcttatgccctccccacgytcctcgcaccgttcacgccattgtgcagcacagctgttaggaccaaattcatcttccccgcaaggacgagtcaggcccagtgttgcactggtcctgctgt

SEQ ID NO: 43626 - DNA, 201 bp, Homo sapiens
tactgaagttcagtgataactctgagcagtttcattgtgatcactgtaaatggtaatcagttggaattctcctaaatgtcttccagacactagtaaaaaamgacctgaaaattgtttgtggaacgcttcacttttcttagactgaggacggagctggctttgaatgggaacctccatcccaggagagaagagccttcattg

SEQ ID NO: 43627 - DNA, 201 bp, Homo sapiens
tcgcccgtgcccaccgctgcccacgtggcctctttccaggcggcagccagggcttctggcacgtcgggcgccagcactgtcgcttgtggccacggcccgcrgagcttcagtcccttgagctcctcctccagagcagggccgagggtctcgccccagcccgactggctgtgcctgcagatgatgctggtcacgcagcttttc

SEQ ID NO: 43628 - DNA, 201 bp, Homo sapiens
ttgctctgggtgccaacccaggctggagtgcaatggcacgatctcagctcactgcaacctccgcttcttgggttcaagtgattctcctgcctcagcctccrgagtagctgggattacaggcacgtgccatcatgcctggctaattttttttgtagagatggggtttctccacgttggtcaggctggtctccaactcctgac

SEQ ID NO: 43629 - DNA, 201 bp, Homo sapiens
agagccgacgctgggcgggcagcgtccgggagcccctccgaccctgcgctcccctcgtccgcgccctgaccccgcgtctccggccgtccagcccgcgccgygtcacctcccctcccggagcgaagggccctgctcgcccgaggacggaggcccgcacgggacacggggccccagtttccgccccggaagcccaggacacgg

SEQ ID NO: 43630 - DNA, 201 bp, Homo sapiens
cttctgctgcggaacttcctcaccttccaggcagggcccaggagccacaggagcgtgggcagggcagggtctgccctctgtgcttccgactcgccgcttgygagctggagggacagtcacctcgacctggtgggctgggtgggcctggctgtgctgtgggctgtgcctcactcctgcaagtgggcactcagcggggttggg

SEQ ID NO: 43631 - DNA, 201 bp, Homo sapiens
gacgagtcaggcccagtgttgcactggtcctgctgtctggcttctgctgcggaacttcctcaccttccaggcagggcccaggagccacaggagcgtgggcrgggcagggtctgccctctgtgcttccgactcgccgcttgcgagctggagggacagtcacctcgacctggtgggctgggtgggcctggctgtgctgtgggc

SEQ ID NO: 43632 - DNA, 201 bp, Homo sapiens
gccacaggagcgtgggcagggcagggtctgccctctgtgcttccgactcgccgcttgcgagctggagggacagtcacctcgacctggtgggctgggtgggyctggctgtgctgtgggctgtgcctcactcctgcaagtgggcactcagcggggttggggtcacgaggctgaggtcggcttaaagcaggagtgggcagttgg

SEQ ID NO: 43633 - DNA, 201 bp, Homo sapiens
tccgtcacggtcacacctcatgaaatggttagattcttccaagtgccttctacgcccctggcagattttctagaatttgctgtcccagaagcttgagaagkgtccggtgccacccgacagcagaagccgggatgccgctgagatgccagcgcttctgagtccctctcactgcctgccttctggtggagagaaggctgtcct

SEQ ID NO: 43634 - DNA, 201 bp, Homo sapiens
cggaggcccgcacgggacacggggccccagtttccgccccggaagcccaggacacggctccagtggcggcgcggcccagggcgcaggcgcgggtgtcggtyccaccgcgcgtcgtcctcgccccggccccggccaatcccttcgaatttggccgaggccgggaaatactagctaatcacggcgcgcgctgttgacgccggc

SEQ ID NO: 43635 - DNA, 201 bp, Homo sapiens
gctgtgctgtgggctgtgcctcactcctgcaagtgggcactcagcggggttggggtcacgaggctgaggtcggcttaaagcaggagtgggcagttggcacrtcatgtttctcctgcatcagggctgtggcaggaatgccgggtgactaccgtagacacttgtcaaggttgaggttcagagaaaggtgtggggtatcccgga

SEQ ID NO: 43636 - DNA, 201 bp, Homo sapiens
gtgcggcctctcgctgggcatgggccctgcagcagcacctggccatctaagttcaggagggtgctgtgtgctgcctctcccttcagtcctgcctccttcaytctcagcagtcccaggtctggctctgctcccaggacgctggactctcccctcccagtggactcgcaggctggccgcctctgctcctcccgaccgcagccc

SEQ ID NO: 43637 - DNA, 201 bp, Homo sapiens
ggtcggcttaaagcaggagtgggcagttggcacatcatgtttctcctgcatcagggctgtggcaggaatgccgggtgactaccgtagacacttgtcaaggytgaggttcagagaaaggtgtggggtatcccggaggtcaccacagtgtgccaggaggttcaggttggccttccagagcccggcctgtgtgaaatccccacg

SEQ ID NO: 43638 - DNA, 201 bp, Homo sapiens
cccaggctggtcttgaactcctgggtacaagcagtcctccctcgtgggcctcccaaagtgctgggattacaggcgtgggctcccgtgaccagcctggaacrtgctgatgagcctctttttctcctgaaaccccggtgggaacagatggtggatgcttccaaaagcatcgaagctgtccatgaggacatccgcgtgctctct

SEQ ID NO: 43639 - DNA, 201 bp, Homo sapiens
tgtacatagactgtttgctcctggccagcaggcctgtagctgcgctgggagggcctccatggggcctgggctgtgggtggcggggactggcagccgttctrtctacctacttttctgtccacttgtctgtttacaaaggaaaaacaaaggtgacactggagaaaccgacacgtttgaggttctaaaaattaaacgagccac

SEQ ID NO: 43640 - DNA, 201 bp, Homo sapiens
caagcaattctcctgcctcagcctcccgagtagctgggattacaggtgcctgccaccatgtccagctaatattttgtattagtagagacagggtttcaccrtgttagccaggatggtctcgatctcctgaccttgtgatccgcccgcctcagcctcccaaagcgctgggattataggggtgagccactgcgcacagcctgt

SEQ ID NO: 43641 - DNA, 201 bp, Homo sapiens
gtccggacccagctgctctgtgctgcaggcgttctaggccgggggtctccaggggttctgtacatagactgtttgctcctggccagcaggcctgtagctgygctgggagggcctccatggggcctgggctgtgggtggcggggactggcagccgttctatctacctacttttctgtccacttgtctgtttacaaaggaaaa

SEQ ID NO: 43642 - DNA, 201 bp, Homo sapiens
tgctgtacttgttgtcatatgagatttctgagttgtattgttgggataattttctttttctttttttgagatggagtctcgctgtgtcacccaggctggartgcagtggtgtgatctcggctcactgcaacctccacctcctgggttcaagcaattctcctgcctcagcctcccgagtagctgggattacaggtgcctgcc

SEQ ID NO: 43643 - DNA, 201 bp, Homo sapiens
gttaacacacctggctaatttttgtaaaattttttgtagcgatggagtctcactattgttgcccaggctggtcttgaactcctggacccaagcagtcctcytgccttggtttcccaaagtgctgtgattagaggcatgagccaccctgcctggccttatttttttttaggagaaatgtcttgctctgttgcccaggctgga

SEQ ID NO: 43644 - DNA, 201 bp, Homo sapiens
caaaaacctagactacactaagctttaactgttgggttctttcttggcagaatttttccctagactggtgtaaacagccagacgtgggccttcccaaaccygacctggtcctgttcctccagttacagctggcggatgctgccaagcggggagcgtttggccatgagcgctatgagaacggggctttccaggagcgggcgc

SEQ ID NO: 43645 - DNA, 201 bp, Homo sapiens
ctttcttggcagaatttttccctagactggtgtaaacagccagacgtgggccttcccaaacccgacctggtcctgttcctccagttacagctggcggatgmtgccaagcggggagcgtttggccatgagcgctatgagaacggggctttccaggagcgggcgctccggtgtttccaccagctcatgaaagacacgactttg

SEQ ID NO: 43646 - DNA, 201 bp, Homo sapiens
ctgggctcaagcaatcctcctgcctctgcctccttgaaagctgggattacaggcgtgagccaccgtgccaggcctgtgattcattttgaatttatgttcgyggagggtatacggtctggtctagatttattctctttcatgaggatgtccagttgttccagcagcgtttattgaggaaaatgcctttgcaccattgcatcc

SEQ ID NO: 43647 - DNA, 201 bp, Homo sapiens
cactgccacagagaagccgctgggggagctatggaagtgacccaaggctgcccactggagacgcctctccctgcagtcccccgagaggtgggagactcgcrgaaggccccgtccccagcggagtccagaccccacaacttcaggagctctttcccggcagcagagatctgcaggctgcctcttctgccccggagctggggt

SEQ ID NO: 43648 - DNA, 201 bp, Homo sapiens
gagtctcgctgtgtcacccaggctggaatgcagtggtgtgatctcggctcactgcaacctccacctcctgggttcaagcaattctcctgcctcagcctccygagtagctgggattacaggtgcctgccaccatgtccagctaatattttgtattagtagagacagggtttcaccatgttagccaggatggtctcgatctcc

SEQ ID NO: 43649 - DNA, 201 bp, Homo sapiens
tacaggtgcctgccaccatgtccagctaatattttgtattagtagagacagggtttcaccatgttagccaggatggtctcgatctcctgaccttgtgatcygcccgcctcagcctcccaaagcgctgggattataggggtgagccactgcgcacagcctgttgggataatttaagcttgacagttcaaggcctatgaaaca

SEQ ID NO: 43650 - DNA, 201 bp, Homo sapiens
gtgtagggagtcactctccttccgtcacggtcacacctcatgaaatggttagattcttccaagtgccttctacgcccctggcagattttctagaatttgcygtcccagaagcttgagaagggtccggtgccacccgacagcagaagccgggatgccgctgagatgccagcgcttctgagtccctctcactgcctgccttct

SEQ ID NO: 43651 - DNA, 201 bp, Homo sapiens
aaaattattttacctgtctaatttcaaaatgctcaagtctggctattgtcgtttttgtttcccaagtagctcaggggatgcccaaacaccagatttaatcyttctttcatcatgtttaaattgaaccagtgtcgggaaggaagggaagaggtaaatcacacttcagggggaaagttatcaagttggctgtcctggaaaaag

SEQ ID NO: 43652 - DNA, 201 bp, Homo sapiens
aggatgcatgagacagaattttaaacagatcacagggtgttggttgagactctcagacatgtctcaagtcatcacttcctccccagccagtgctccggggwttggtaaacaggcaacgaatgaaagagatggtttccaaatcctctcccacctgcccaccaccccaggttcctgtctgtcattccattagctttcttcttt

SEQ ID NO: 43653 - DNA, 201 bp, Homo sapiens
ctcggttcctggtgactgcccagtgccctccattctatgaagtgaatttgatcagagcacaatgatgcaggataagaatcagaaagggcagtgccaaggtrcaggggctacaaggaaaggtgactcccctcgctatctgaggataagaggcaattgatgatggcccaacactcacagcttctatcttccccacaaagggaa

SEQ ID NO: 43654 - DNA, 201 bp, Homo sapiens
ctacgaaaacaggtaaaggaaaaaaggccagtaggtacaggtatgtgcaaggtacacacagagacacatgacctggtaatactgctcttatgttacatgaygatcacttcaccctctcaacaacttcctggtcgacaaaagtgtggctggacaaagcaaaggagatactgcatggaaaatacttagcaaagtgccataagc

SEQ ID NO: 43655 - DNA, 201 bp, Homo sapiens
aagacctaacggtggaccatgaacgtgaagtgaaattggcggagaacctttgaccagcatgccctgcccagtggctggggcctaccgctctataatacaayggggttttcagaatacaatcctttatacaagtaggcagctcttccatctgttcatgtctcagttataaaacaaagctccatgcaaaagaaaagcaggtga

SEQ ID NO: 43656 - DNA, 201 bp, Homo sapiens
gcatgccctgcccagtggctggggcctaccgctctataatacaacggggttttcagaatacaatcctttatacaagtaggcagctcttccatctgttcatrtctcagttataaaacaaagctccatgcaaaagaaaagcaggtgagaagattaatccaaatatccttagaaaaaacaaaatgccctccagcacacttacat

SEQ ID NO: 43657 - DNA, 201 bp, Homo sapiens
cttggcatttgagatgtttgacttagcaataaagaagggtaataaggagcccaaggccacaggtcacctcattcgacaccaccttctcaccgagctctgamgccagattaccagctcatgagcacttctatttcagtagtgataacgtactcatatctcatgagcattcatatttcatttgtggcctgcttcatcgctggc

SEQ ID NO: 43658 - DNA, 201 bp, Homo sapiens
ccccgcgacgcacatcttctccgcgcctcgggtcccccgccctgggtccttttgtgtgcgctcgcgccaggagaggcgcgccgccccgtgcgcttacctgyggcggaggtcactgtgagcccgaaaaggagccacagccccggctccatgaacctagatcaggcgccggagcaccggaccaggaggacggccgcttgtggc

SEQ ID NO: 43659 - DNA, 201 bp, Homo sapiens
gaagtgaccgctggaaagcagctgaacaaagcaaaggtgatcaaggtcactggatgggagatgaaggatgcatcgacacctcaggccgaagggtccttgargacaggaatcaggtctgattcttctttgtctgaaatcgacacattacctgacaaagtcaaaatcctcaataaccactcactcaacccatttgtctaacca

SEQ ID NO: 43660 - DNA, 201 bp, Homo sapiens
agaattggcgtttggtgggatcctgccacattacataggaaggtcttaaaagatccacagcagatgtctgtttgggccacattgctcccctgagaatctcytcccttcttgtggttcactttccccgctgcgtgctgagccatcactctctgaaagactctgtccctttgtttactgggcttttcatccccagccagaaat

SEQ ID NO: 43661 - DNA, 201 bp, Homo sapiens
tcaggtttgcaccttttcatgtgtgttatccttttgaggccatctgccttctccaagcagaacttgtgtttctcatcaatggaggaggaggaaaaaagagygtagagccctctgattttctattatcttgtagatttgctgtaagactgtttaatgttcctctggggtttgaacttttccatggaaaacagtggctaacat

SEQ ID NO: 43662 - DNA, 201 bp, Homo sapiens
cccatagtccttgcagctagagagtaggcagcccctacatgcaagataaggtcatatctcaaaagcctttcctttagtgctcaactagtttctattccaascttcatctctacttcaaactcaaagcgccatttcccatagaagagttctggggataaaaagaggaaaagagttattcttggaggccttccccataaccca

SEQ ID NO: 43663 - DNA, 201 bp, Homo sapiens
ccatgtgcaaaacatcccatccccaccagctcaactcattacagcatcaactctatgtccaaaatctcatctaaatatcatcaggtcaaaagtgccaaatstcttcatctaaatcagtatgggtgagacattttgtacggtccatcctcagacaaaattcctcttcatctgtgcctctgtgaacctagaaagcaagctacc

SEQ ID NO: 43664 - DNA, 201 bp, Homo sapiens
gctgagaacataaaacgccgcacagagctaagagaagaagacagtgtgttcagctggatgatcagaggaggcagcattgtccttggtccctaaagcaagcygggcgccatgatttgaggcagcagcctgcagtgacactcgccaacaccagctctcaagcgaaagagctccctttcctactgttcttctggcttctgacga

SEQ ID NO: 43665 - DNA, 201 bp, Homo sapiens
cattcatatttcatttgtggcctgcttcatcgctggctgtttactgagtagtgaacaggaaagacctaacggtggaccatgaacgtgaagtgaaattggcsgagaacctttgaccagcatgccctgcccagtggctggggcctaccgctctataatacaacggggttttcagaatacaatcctttatacaagtaggcagct

SEQ ID NO: 43666 - DNA, 201 bp, Homo sapiens
tatttgtcacgttttcccaaacatcatgtataagtgttattaaatattaaattccccaatctctcatattcattcttcatctgcaacaccacactgaaaaygctttatttctctctacaagaagtttttaaataaggaaagctgacttttgttttaaagattctgtttttaagttccgtgttgccttttcatgaatgaatt

SEQ ID NO: 43667 - DNA, 201 bp, Homo sapiens
gtagatgggtaaggtaccagagcaaaacagaggctttactaagctggcagacccaggcttctagtcccaaggatgactcattcacaggaaaggtgggcacyttccttctggccctgagaaacaaaagggctggctgggtctctccagggtccctctggctccaaactccactcagatgtttccaaaggccctcaccatccc

SEQ ID NO: 43668 - DNA, 201 bp, Homo sapiens
gagaagagggaaaacagggagcaagtattttcataaggatggggttatgtgcaaagggattaaaaaaaatgccgacaccatgatacatgctttgaataatytaaagaaagcaagagaagacactcttgctaattttcaggagataccaggttaaggatggaaaagatcttcatgagcaagacttatgcttaccatcacaat

SEQ ID NO: 43669 - DNA, 201 bp, Homo sapiens
agaatacattaaaatacaagtttaaatgttttgttaatgcttttttttttttttttttttttttactctttatgcatttaggggagaaaaaaactcaaaaraaatggcattcctgctggattaagtttagtgtggcttgatccagggcagcctgggaagccggcctgggcatcttgataggagctgatcagactgttggga

SEQ ID NO: 43670 - DNA, 201 bp, Homo sapiens
gtgcagggaaaaaaccacatcctttcaagatccctggcccatcttcctccctttcttctcctctctttgataatgctgttgcatttctcatagtgggcggsggggagggttccccaagtcctcagatgcctccggcatcacacacagggacttcacgaaaggtcccctttgtcccagtgctcacctctaccagctagattt

SEQ ID NO: 43671 - DNA, 201 bp, Homo sapiens
cctgtgcatccccaacagaaaagtcctcgtaggactgacctttccaacaaactgcgaaacttagccctaagtctccccaattttaaagaagtatcttgccrtccagtgttctaagaaatatgccactccaactcaaaactggtacccaaaagtgtgctaatttctaaggaagagatagaaatggttatgtgaggggaaaaa

SEQ ID NO: 43672 - DNA, 201 bp, Homo sapiens
tgtctgaaatcgacacattacctgacaaagtcaaaatcctcaataaccactcactcaacccatttgtctaaccatgggtttgctgtgtgccctaagcaccktacttgggtgatgtcactgaattctcaatataatcctatatgatcaaggccaacattaccattgacagcctggacctctgataggctaatgagaagcaca

SEQ ID NO: 43673 - DNA, 201 bp, Homo sapiens
tactattgtttttcccaattgacaggtaaggaaacggtccaggtgagttcagaatcattgtctcctaagctgatgatcattctagtatcttctgggacccygctttaaggctcctgtttacaccagggcccctgagaattagatcatgaaagatttccaagggatagtttctctgctcagaatcatgagtgacccaaatcg

SEQ ID NO: 43674 - DNA, 201 bp, Homo sapiens
tcaggctgcttatcagcaacagcagacagccaggcacaccttttcccagagtctgtaagctttctgctaattgaggctaacagaccgtcctgcaggggacagggtggacaggtttgctccggggcactccaggagctaagatcagagtcagaaggtccaaagaggtggaccccagcagaacttgagcaaggactttctact

SEQ ID NO: 43675 - DNA, 201 bp, Homo sapiens
cacatggcttggctccacttcagcatttgaggatggcaaatctcttctaaatcataagtagttcgggcagcaaaatcttgactttcatttcatcttatttyatgttttggtgttctcatccaatccaatcttttttatagaagatggtcaataaatcattcaaaattagaattgtagatttatgtacatcagtggtactca

SEQ ID NO: 43676 - DNA, 201 bp, Homo sapiens
gagcaaacttctacctacttcaacctccttcattttgaagagagagaaggacagagacagggtgcaaatttgagcaagatgggaagcattcaagaagaaaytaaataactccaaacagaaaagtgggtgaatggtgactgatggctttggatgagtgaaaccaatttatctcccagaagcccctggaatgcacatggcttg

SEQ ID NO: 43677 - DNA, 201 bp, Homo sapiens
tttcagtcttcagccaggctctgaggggctggtccgccatgaaatgtggttcgagctgacatccccgttatgggtcactttaggtgtcaacttggctaggmtactgtgcccagttgtttagtcaaacagcagcctagatgttgccctgaaggtatttttgatatgtgattaacatttaaatcagtagactttgagcaaagc

SEQ ID NO: 43678 - DNA, 201 bp, Homo sapiens
aagagagaaagagtggccatttggaccccgaagcagcacattatacaaccatccaatgcaatgctaacctggagcctcatacccatagacagaccacttcytgatggaagggcacagattccatctctcaacagcacccagcccttgggggaaaaaggtaaaggaagtcgatttgtttttggaatctcttgcattttggta

SEQ ID NO: 43679 - DNA, 201 bp, Homo sapiens
ttgtccagagataggcccatgagccaagcctggctgctcaggacccaggagattcagttctgggactttgaaaagaggctcttctgtttttctggggagcygctgagaaaatcagatgaaagcttgctggtgccagcagtacttgtcatcatgaggtgaaaagtctctccgggaatggtgccaacacagagtaatcggtag

SEQ ID NO: 43680 - DNA, 201 bp, Homo sapiens
gaacataaaacgccgcacagagctaagagaagaagacagtgtgttcagctggatgatcagaggaggcagcattgtccttggtccctaaagcaagccgggcrccatgatttgaggcagcagcctgcagtgacactcgccaacaccagctctcaagcgaaagagctccctttcctactgttcttctggcttctgacgatggcc

SEQ ID NO: 43681 - DNA, 201 bp, Homo sapiens
acctctacagaggacacgaatgaataggcattcttctccgcagacgtctgccaatattccttgatcctccttcactgcctcagcatccaatgtgcccctargagaagtcatgtatcaggacactgctggggctcggccaagtgcacggcttggtcattgtgtttatttttcctcaactttttccaagtcagcagatgtgcg

SEQ ID NO: 43682 - DNA, 201 bp, Homo sapiens
gtttcatttaaatagaggtgttgttttcatttaaaaagcccagctggtgacttgagtgtctccccaacaaatagaacatgttcatgtcacacttaggatamatgtcaagttgatgatctgcttcctcggttcacatttttccttctgaactgggaaagcagaggcaatattgccttttggcccaggggacatattgtacag

SEQ ID NO: 43683 - DNA, 201 bp, Homo sapiens
acctcctgccattccctggagaaacaacttctagaccctcgcatgctttctaactacagctcaatttcagactttattacattccctagaaggcaccactyatcaactctcccaagcttagaaatgtctgcctgggcagggaggaaaatgtcaatcacctttatttaccatctgtaatctgaaccagtcagaacgtggctc

SEQ ID NO: 43684 - DNA, 201 bp, Homo sapiens
aaccatgggtttgctgtgtgccctaagcaccttacttgggtgatgtcactgaattctcaatataatcctatatgatcaaggccaacattaccattgacagsctggacctctgataggctaatgagaagcacacttcccttctgacatcttcctccccaaaatcaataagctcagtctaatacgaggaaaacatcttgcaaa

SEQ ID NO: 43685 - DNA, 201 bp, Homo sapiens
tccccagccagtgctccggggtttggtaaacaggcaacgaatgaaagagatggtttccaaatcctctcccacctgcccaccaccccaggttcctgtctgtmattccattagctttcttctttctccttctagattcacagctggggattctggccaagacaagaactcggttcctggtgactgcccagtgccctccattct

SEQ ID NO: 43686 - DNA, 201 bp, Homo sapiens
acagtgacagcaggactttaagccgagccagagtctttctgagtgcaggactttgtgcacgtgtcctgctggctcaatgtgaagcccctgcctgcccttcragcatggtggggtgatgttccagatctatcatggatgtgattagaggtcttgtcccctggtctgaaagacattccacccctcaggtttactaccctcgtc

SEQ ID NO: 43687 - DNA, 201 bp, Homo sapiens
tgaaaccaatttatctcccagaagcccctggaatgcacatggcttggctccacttcagcatttgaggatggcaaatctcttctaaatcataagtagttcgygcagcaaaatcttgactttcatttcatcttatttcatgttttggtgttctcatccaatccaatcttttttatagaagatggtcaataaatcattcaaaat

SEQ ID NO: 43688 - DNA, 201 bp, Homo sapiens
tttgcatactttctgcaaactttgccagggtttggcacagcctctgaatagttcgcaaactttctgaaaagtccccagtttcatgaaaaattgaccaagtyggcccaggcagcaggtctccagccagtgcgcgggctgcaactcccggagcccgtgcgggtagtcgttgcgcgccgcttctgctccccagccctcccccag

SEQ ID NO: 43689 - DNA, 201 bp, Homo sapiens
ggcccccagggtggtggaggggagagtgtgagctttgtcccagtcttgctgatggttttcagcccatttcttcctctgtacacaaaggtaaggcaagatgygctctgcaaagaaggaggtcttccctgctttcattccatcagcaaatttactaaagaccatctgtgagccaggtactgtttttggcaccagggaacaaga

SEQ ID NO: 43690 - DNA, 201 bp, Homo sapiens
taggaggtcgaggctgcagtgagctgtgatggcgccactgcactccagcctctgggcaatagagcaagactttgtctcaaaaaaaaaaatgcagacatctyattaatacttgtatacacttttatttttggacccagtcacccttccgtgccatacttatgggtttacttgttcttttggacactgcagagtatccattga

SEQ ID NO: 43691 - DNA, 201 bp, Homo sapiens
taggatttcaacagataaatctggagaggacaaatattcagaccataataattactatctctttggaattaaaatttccatcttcaacaaaataaaaagtycttggattgggggatggctggaggaatagaaaatatactaatcagctaaaaggagaaaaggagtaggaggaggtttccgggtaccatgttcagacacagg

SEQ ID NO: 43692 - DNA, 201 bp, Homo sapiens
ggtgtggcccacgttccaaagggctacctgagtgctgcctggctgctgccccagtgaagtggtgaagcgctgccaccacccctctgttcccatcgcccaaygaagcctccttcccccaacaagagctccttgttcactacagagcaacagaagctgtcaggcactactagaggttgactctaaagcaaccctagtttgcaa

SEQ ID NO: 43693 - DNA, 201 bp, Homo sapiens
tttatttttggacccagtcacccttccgtgccatacttatgggtttacttgttcttttggacactgcagagtatccattgaatgaacacacaatggcttayctaacactgacttttggatggacgtttaggttattcccactcagtcactgttacaaacagtgctgcatcctcctacaaaagtctccgcgtgcttgtttct

SEQ ID NO: 43694 - DNA, 201 bp, Homo sapiens
tttttgaacaaagggatacaaaaggaatgtagcaggccataggcttgtacaaagggatagcaggccataggcttggagcctttgtcaggctgtggaatcgrgcttactgtgcatggtagtgattgacataaaattcctttctaaattaatacacttaagtcaagtaaaggtaacctcaattacaatatgaagtaattcatt

SEQ ID NO: 43695 - DNA, 201 bp, Homo sapiens
gttcatcccaccaccccacaaggtgggaagtccatctcccgcagccctcagaaagagcccatgattctagaatatttggaaataccaaaagcagtgagcawtgtgctgtgggttaattgttgcctttttaaaaaattactctatccccctcctttccccctcaaaaaacctttggatttacccaggacttggctgtttgag

SEQ ID NO: 43696 - DNA, 201 bp, Homo sapiens
tggaatctcttgcattttggtatttgttttatttcagcaatgcctctaactcatacctttcccatccctcccaggagccctgacccagaccgcatgcacgmacacacacacacacacacacacacacacacacagtctcaacttatctcaaacaacatgtgtgtactttaactggagccttcaatgcctcagccaaagttg

SEQ ID NO: 43697 - DNA, 201 bp, Homo sapiens
ggggacactgaaggtctcagaggtgacatctcctaagtggcagatccagatttcagcccaggcattcgagcccacagtttgagctcttaacccctacaaarggatctgttcctcctccacgtgacaatttggatgagtgggccccaggccccattcctctctaaaccccaggagtctctaaaccaaagtgtgaagctggat

SEQ ID NO: 43698 - DNA, 201 bp, Homo sapiens
ccagatcaaatgctgccccttctagcaacctgatttgcctgtttaaaaaaataatatgttgagatcctcctgtagctgctcaaacatttagacttgcaggmaagcataatggcctcactcatgggctttgaagtcaaacagacctggatcaaaatactgacatcccccttgcctagctgtgtgaccttgggcaagtcactg

SEQ ID NO: 43699 - DNA, 201 bp, Homo sapiens
ggattaattcatgccagacgctaaagtcaggcatatgatggcagttaagcccacaaaagatgagtgactgccgctccagcctgagcaatagagtgagaacmtgtctcacaaaaataaaaatacatataatgaaagcacagaactccatcattaacattctaacaagatatgactgtgggctgtggagttcctggctggcct

SEQ ID NO: 43700 - DNA, 201 bp, Homo sapiens
tatgactgtgggctgtggagttcctggctggccttctctttctgtgttggggaggtgttaaaaatatgctttcatcaaagggaggctgtcctggggcagtmgggattggaacagaaggaggcagcagccttgtcattatgcgatttagtatcagtgtcatgtccatgcaccttataacattatctcaggctccactcttga

SEQ ID NO: 43701 - DNA, 201 bp, Homo sapiens
ccttctctagaggagaaagcaggaatcccctgccttggggatctgtgtgcctgtcaccacctgaagccaacttaacaagggcaccaccttgggagcagagrctgggagcatgcaggtgggatcaaaggaccctatggcaatgctgcctcatgttatgaggctttctccggccacccctcccctccattgcctctgggtctt

SEQ ID NO: 43702 - DNA, 201 bp, Homo sapiens
tcctaagagatttcaatggaaaagcatgaggacatgattcataggagttctgaggagacacgctgaccatgttgttggcttggttggaggcttgtcctttwaaaagcacctatttcttgtaaaaaatgaaggaggtttttcctcgttctgcacagccagccactcagtggccgcgggacttccatggccatacgttgggcc

SEQ ID NO: 43703 - DNA, 201 bp, Homo sapiens
gtgcacggcttggtcattgtgtttatttttcctcaactttttccaagtcagcagatgtgcgactgatactttgagtccttaccacttacattttgattcayaacccagccattaagaatgttgcaatttatctcagataagcatcccctcaagttgtctctttatgtgctttatgattctttgaagattgtttttccttta

SEQ ID NO: 43704 - DNA, 201 bp, Homo sapiens
tcagctgcagcttttctgaaggcagtcttagggagaatggaggcaggagttttaaaggtcataaaaatttcaagcgaaagagatgctccaaatctcttagraaaaattgtcaacagaaaagaaaggaaataaaggtcacatgattatgaaatggaagggcacaaaccccaaggtggcattcattttgcatttaagtcctgt

SEQ ID NO: 43705 - DNA, 201 bp, Homo sapiens
ctgtctcacaatagagttatgaataagatctcatggttagcagtagccttagacatgtggggaagcaagctatgggctgcatgaggaaataattacataayccaaaaaggaggccagaggttgtctaagtaagcttggagaaacaataattccaaaataagctgagaccaactttgtagcgtaatgaacattcaaagctgt

SEQ ID NO: 43706 - DNA, 201 bp, Homo sapiens
tgagcaaacttctacctacttcaacctccttcattttgaagagagagaaggacagagacagggtgcaaatttgagcaagatgggaagcattcaagaagaamttaaataactccaaacagaaaagtgggtgaatggtgactgatggctttggatgagtgaaaccaatttatctcccagaagcccctggaatgcacatggctt

SEQ ID NO: 43707 - DNA, 201 bp, Homo sapiens
gcagggaagagagaaagagtggccatttggaccccgaagcagcacattatacaaccatccaatgcaatgctaacctggagcctcatacccatagacagacsacttcctgatggaagggcacagattccatctctcaacagcacccagcccttgggggaaaaaggtaaaggaagtcgatttgtttttggaatctcttgcatt

SEQ ID NO: 43708 - DNA, 201 bp, Homo sapiens
ccctgacccagaccgcatgcacgcacacacacacacacacacacacacacacacacagtctcaacttatctcaaacaacatgtgtgtactttaactggagscttcaatgcctcagccaaagttgggaatttcaagcatctcagcagatacatgggagagatgcttttgaataagttaagtcaacatgccacaaacacacct

SEQ ID NO: 43709 - DNA, 201 bp, Homo sapiens
ctgctcatggtaattgtctccagaaccagcagcagaatggctatgttggttcattggtcagggaatgagaagagctactgaaataaatgcttagtttttttctagaaagtctgaaatttcacagttctagcaggcaagacataagtgctcgttcaaaaccatctctggtgggagtagaaaccatgcagggaagagagaaag

SEQ ID NO: 43710 - DNA, 201 bp, Homo sapiens
gagctgaacatgaagttgggctccaaacctaagttgccactcttaaacatcaaaagcagtggttaaaaatagaggaatttatagagtgcaggtgattcatygttgttgaggcttgtgggtccacccccccacaaaaaaaaacagctagctttttttccttacatgaaactatttaaacttctgtccccagcgctagagaaa

SEQ ID NO: 43711 - DNA, 201 bp, Homo sapiens
ctgccattccctggagaaacaacttctagaccctcgcatgctttctaactacagctcaatttcagactttattacattccctagaaggcaccactcatcarctctcccaagcttagaaatgtctgcctgggcagggaggaaaatgtcaatcacctttatttaccatctgtaatctgaaccagtcagaacgtggctctaatg

SEQ ID NO: 43712 - DNA, 201 bp, Homo sapiens
atctgttgagggccttcacagaaaagacaggttcccgaacagaaaagaattctgcttccagacctccttgacatcaactccctcgggaattttcagcctgrtggcatgcagatttctggcctgccagcccccacaatcatgtaagccaaattctgaaaattgctctttgtctctctccatatatatatctctggagggaca

SEQ ID NO: 43713 - DNA, 201 bp, Homo sapiens
ggcttcttcttgcctccagtctgtgagctttcccgtgtccttccaataaactcctcctgtgctttgccagctagactaggtttctgttgcttgtgaccagygaactctggctgatcctggacctcactttcatgagatggcaaccacagactcttgggtataagaggaaggcttgtagtctccccagctgttgaggacaag

SEQ ID NO: 43714 - DNA, 201 bp, Homo sapiens
aagccttagcccaaactgtttacactcttccatggcctattaccataaggctgagattaaaaagaatctcaaagtcgcagcatttatcatctcatcagctmattggaccatagacctattcctcccctaacacaggcacctgcacacttaaggatacttggaggaagcaccagggggtcaaaggaaaggagaacaacagaa

SEQ ID NO: 43715 - DNA, 201 bp, Homo sapiens
tgagaaaagccagtcaaatgtcactgtcctcattgtccatacaagaaaaccaagaattggcgtttggtgggatcctgccacattacataggaaggtcttaraagatccacagcagatgtctgtttgggccacattgctcccctgagaatctcctcccttcttgtggttcactttccccgctgcgtgctgagccatcactct

SEQ ID NO: 43716 - DNA, 201 bp, Homo sapiens
tacataggaaggtcttaaaagatccacagcagatgtctgtttgggccacattgctcccctgagaatctcctcccttcttgtggttcactttccccgctgcrtgctgagccatcactctctgaaagactctgtccctttgtttactgggcttttcatccccagccagaaattgccacagttcttcgctttctggttttctac

SEQ ID NO: 43717 - DNA, 201 bp, Homo sapiens
ctccagcacacctacatatgcaatctctggtgtggaagtggctgactattcaaaggcccatgaaagtgaccctttgcttcagcaaacatccagcagacacygctacgcacaacacatggagacaaaggggagggataggaccaggaacaggagcacctgcactccaaggactgagaagcagggaattctctggagcccgag

SEQ ID NO: 43718 - DNA, 201 bp, Homo sapiens
aggctaagcaggtgaagcttgcctgctgagtagtacacatgagttagaagtcaggagttgccaaggtgaaaacctagcaacacatcgggttttaacaacayaaggcttgaaaaatatgaagaaacaggcaagatatataacaagaccatgtatgtacataaaaaatacatgcccataatttatttatggtgatagacgtca

SEQ ID NO: 43719 - DNA, 201 bp, Homo sapiens
gttgcagccatcagaactgactccgacttgcttaagcattgaaggaatggatcagcaggacatcaatgagctcacagaactgacaaaaatgttcgtgcatyggactcagaaagcaagccagttccagggaagctgagtcgccacagagaccacgaatctgggccccgcagccggctcttctgctgtacactcagaactcca

SEQ ID NO: 43720 - DNA, 201 bp, Homo sapiens
actgctacgcacaacacatggagacaaaggggagggataggaccaggaacaggagcacctgcactccaaggactgagaagcagggaattctctggagcccraggccagcattggttatttttgtctcctaggatccagtctgccaccttctctttggagaattatccgccttccattgtgtgaggtctctggggggcagtc

SEQ ID NO: 43721 - DNA, 201 bp, Homo sapiens
tgcagacagacagggctcaaaatagttcccagcagtggaaagagaagagggaaaacagggagcaagtattttcataaggatggggttatgtgcaaagggattaaaaaaaatgccgacaccatgatacatgctttgaataatctaaagaaagcaagagaagacactcttgctaattttcaggagataccaggttaaggatgg

SEQ ID NO: 43722 - DNA, 201 bp, Homo sapiens
aaaaaaaaaaacatggccaaaatccaccaaaaccaagatggcaacccaagtgaccttctgttgtcctcactgctcattatatgctaattataatgcattasccactaaaagacactcccaccagcgccatgacagtttacaaatgccatggcaacatcaggaagtcaccctatatggtctaggaagggggaacctcagttc

SEQ ID NO: 43723 - DNA, 201 bp, Homo sapiens
ccctgcaagagacccatggaaatcagattcctaaaaatccagaaaagttacatggacctctgctgtctcatgtagttgcttctgactctcggcaaagcaattttgcgctccccaagttgtggggcgaaactgtccaccagcgggccagtcatgtttttggttgcgtctgtcggtacttttgtcatcaatgcatatgaaatg

SEQ ID NO: 43724 - DNA, 201 bp, Homo sapiens
aaacagaaaagtgggtgaatggtgactgatggctttggatgagtgaaaccaatttatctcccagaagcccctggaatgcacatggcttggctccacttcascatttgaggatggcaaatctcttctaaatcataagtagttcgggcagcaaaatcttgactttcatttcatcttatttcatgttttggtgttctcatccaa

SEQ ID NO: 43725 - DNA, 201 bp, Homo sapiens
tgaaaccaatttatctcccagaagcccctggaatgcacatggcttggctccacttcagcatttgaggatggcaaatctcttctaaatcataagtagttcgrgcagcaaaatcttgactttcatttcatcttatttcatgttttggtgttctcatccaatccaatcttttttatagaagatggtcaataaatcattcaaaat

SEQ ID NO: 43726 - DNA, 201 bp, Homo sapiens
aagagatgccatctgccccactggagagcctcgggttgaaggcgaagccgtggaagacggaccagagcctggaggggatcaggcctgcagtggcatcgtcrgaggcactgcatcacgcctcacctgaacgagacatgcatccgggcaccccaatccctatgttctaagcccatttccatctatctttcacttggaacaaca

SEQ ID NO: 43727 - DNA, 201 bp, Homo sapiens
gaagtaaggaaatgaacggtgagagggcagcaaaaaccaatgggacggaggagaagccactgcgggtgggggaaggaagaacagaaatctaagctggctgycggattctggaactttcaaaacctaaaataaggaatggacttcacagaacttctcaagctagggcacagacgcattttcttctgaaagaaatttcacaat

SEQ ID NO: 43728 - DNA, 201 bp, Homo sapiens
acacagttaaacaaaagagtaacacaatcaagcccggaagtcataattcagattcagaaatgcagggggggcaggatttgacctggtaccttctcagagaygtaggactccgagagagcaaaatctcctgccggaacgtgctgatggattggggaggaaatgggaatcatttggctttaaaaaaaaaaaaaaagaaaaaaa

SEQ ID NO: 43729 - DNA, 201 bp, Homo sapiens
ttaagtgagatacatgtgtatgataatatgcacatcctaataactgtacaaaaataagctgttattatttttgttacaatgaccacagtgataaaaatatytggggacccaccctccccaaccccgctccacctgactggttgagtggctggccctagttctgttccatgtttatgcatccagcaaacacttgaatacctc

SEQ ID NO: 43730 - DNA, 201 bp, Homo sapiens
tcagagccagtgactcatcagcaacgttggttggagcttccaggaaagagatgccatctgccccactggagagcctcgggttgaaggcgaagccgtggaaracggaccagagcctggaggggatcaggcctgcagtggcatcgtcggaggcactgcatcacgcctcacctgaacgagacatgcatccgggcaccccaatcc

SEQ ID NO: 43731 - DNA, 201 bp, Homo sapiens
aaggtacacacagagacacatgacctggtaatactgctcttatgttacatgatgatcacttcaccctctcaacaacttcctggtcgacaaaagtgtggctrgacaaagcaaaggagatactgcatggaaaatacttagcaaagtgccataagcaaacagtagctactattgttatttatctggtctgggaggtcaagtgag

SEQ ID NO: 43732 - DNA, 201 bp, Homo sapiens
gttcccagcagtggaaagagaagagggaaaacagggagcaagtattttcataaggatggggttatgtgcaaagggattaaaaaaaatgccgacaccatgawacatgctttgaataatctaaagaaagcaagagaagacactcttgctaattttcaggagataccaggttaaggatggaaaagatcttcatgagcaagactt

SEQ ID NO: 43733 - DNA, 201 bp, Homo sapiens
ctaaagaaagcaagagaagacactcttgctaattttcaggagataccaggttaaggatggaaaagatcttcatgagcaagacttatgcttaccatcacaaygaccgtaaagatacgctcatcttccacctaacctaattgtctgtgtccttgtgtaatgcccttttggtagctctgtcagaggtgttcgaaccagagcaac

SEQ ID NO: 43734 - DNA, 201 bp, Homo sapiens
aagggtaaatatatgattacatagaattatatatatgaatcatcactatcaaaaagaacaaaaccccagccctaacaatgtaacaagacccgatctctacaaaaaaaaaaaaaaattactaaattagctaggcatggtgacacgcacctgtggttccagctactcgggaggctgaggtgggagattcgattgagcccagga

SEQ ID NO: 43735 - DNA, 201 bp, Homo sapiens
gactggccctctgcctcatatggccacatgtccaacaatgatactgccaggtgtggctcacaggtcagggtgacttttgtttttttgagatggaatcttgstctgtcacccaggctggagtgcagtggcgtgatctctgctcactgcaacctccacctcctgggttcaagtgattctcctgcttcagcctctccagtagct

SEQ ID NO: 43736 - DNA, 201 bp, Homo sapiens
ggagtaggaggaggtttccgggtaccatgttcagacacaggaggtatcatggctgcttagaccactctctgggtctatggccttcagtagcttgaagccgacaccaccacttgtcttcactgggactaaaaatcaacaaaccctggatgagcctctcaggcaccaggaggtgctagccaaataccaggatggagctggccc

SEQ ID NO: 43737 - DNA, 201 bp, Homo sapiens
gagtaggaggaggtttccgggtaccatgttcagacacaggaggtatcatggctgcttagaccactctctgggtctatggccttcagtagcttgaagccgacaccaccacttgtcttcactgggactaaaaatcaacaaaccctggatgagcctctcaggcaccaggaggtgctagccaaataccaggatggagctggccct

SEQ ID NO: 43738 - DNA, 201 bp, Homo sapiens
agaggcaataaacaggtaaataacatggtagaacaaaactacagactctgaaagtttccataaagggattggacagggtgaggccacatcgagtaactagsgggggccgtttacaatgggtggtctgtgaaggcctcaaaggtggttgaggtttgagcaggtcccaaggatgggagggagccaggcatttacatccctgag

SEQ ID NO: 43739 - DNA, 201 bp, Homo sapiens
gaaaaacagtatggcagctcctcagaagactaaaaatagaataatgacagccgggcagggtggctcatgcctgtaatcccagcactttgggaggccaagaygggcagatcacgaggtcaggagttcagatcagtctggccaacatagtgaaaccctgtctttactaaaaatataaaaaaatagctgagtgtggtggtgcgt

SEQ ID NO: 43740 - DNA, 201 bp, Homo sapiens
actgtcaatgtaggccgggcacagtggctcacatctgaatcccagcactttgggaggccaaggcaggtagatgacttgaggtcaggagtttgagaccagcytggccaccatggagaaaccctgtctctactaaaaatacaaaaattagccaggcgtggtggcaggtgtccgtaatgccagttactcgggaggctgagccag

SEQ ID NO: 43741 - DNA, 201 bp, Homo sapiens
cacttacatacgcaatctctggtgttgtgtgtgttcatccaataaattatcactcaacttatgtattcagaacattcattatttgattggtgtggtgacawcagagtcttttttatcaaatgtttcttatttgtcacgttttcccaaacatcatgtataagtgttattaaatattaaattccccaatctctcatattcatt

SEQ ID NO: 43742 - DNA, 201 bp, Homo sapiens
ttggacccagtcacccttccgtgccatacttatgggtttacttgttcttttggacactgcagagtatccattgaatgaacacacaatggcttatctaacaytgacttttggatggacgtttaggttattcccactcagtcactgttacaaacagtgctgcatcctcctacaaaagtctccgcgtgcttgtttctgtaggac

SEQ ID NO: 43743 - DNA, 201 bp, Homo sapiens
ttcttatttgtcacgttttcccaaacatcatgtataagtgttattaaatattaaattccccaatctctcatattcattcttcatctgcaacaccacactgraaacgctttatttctctctacaagaagtttttaaataaggaaagctgacttttgttttaaagattctgtttttaagttccgtgttgccttttcatgaatg

SEQ ID NO: 43744 - DNA, 201 bp, Homo sapiens
actatttacacagtttggggtttaacttaaatatttattgtgtatcagccccttagatttccttgaaaaatctgttttgtaatgtatgtttacatgggttygtctaagcaggacctcagatcaaccactgatttgatcaaatcagtttaaaaacagggcatattgagcaattgatcttgctggggattttgttgttgttgc

SEQ ID NO: 43745 - DNA, 201 bp, Homo sapiens
gggctgcatgaggaaataattacataacccaaaaaggaggccagaggttgtctaagtaagcttggagaaacaataattccaaaataagctgagaccaactytgtagcgtaatgaacattcaaagctgtgcagattcaacagaggagatggctgtgtcattaagaaattatgtccaacatcaaaagccaattaaaaaatgaa

SEQ ID NO: 43746 - DNA, 201 bp, Homo sapiens
actcgagatcagaaaacactctggagctacaatttgccaagcagccccgcccctccttgtccatttggtgcacccctagacccccaatcctgtcctaacasctctcctttcagagcctagggcttcttcttgcctccagtctgtgagctttcccgtgtccttccaataaactcctcctgtgctttgccagctagactaggt

SEQ ID NO: 43747 - DNA, 201 bp, Homo sapiens
aaaggaggccagaggttgtctaagtaagcttggagaaacaataattccaaaataagctgagaccaactttgtagcgtaatgaacattcaaagctgtgcagmttcaacagaggagatggctgtgtcattaagaaattatgtccaacatcaaaagccaattaaaaaatgaaggtgatgaaggtctggtcccctctggctaacg

SEQ ID NO: 43748 - DNA, 201 bp, Homo sapiens
tggcaataactcctgcaggccacatcagcaccttggtggacaaactaggctgcgtagatgggtaaggtaccagagcaaaacagaggctttactaagctggmagacccaggcttctagtcccaaggatgactcattcacaggaaaggtgggcaccttccttctggccctgagaaacaaaagggctggctgggtctctccagg

SEQ ID NO: 43749 - DNA, 201 bp, Homo sapiens
ctaaaaatccagaaaagttacatggacctctgctgtctcatgtagttgcttctgactctcggcaaagcaattttgcgctccccaagttgtggggcgaaacygtccaccagcgggccagtcatgtttttggttgcgtctgtcggtacttttgtcatcaatgcatatgaaatgaagctgtttctggtttttcaattactgggc

SEQ ID NO: 43750 - DNA, 201 bp, Homo sapiens
tttgcaaagtagaggaattatttgtaaagtgaaaaactttgtatcatgtctgctgcaaggagaccgagagacagtctggaggcagctctagcaacagtccrtctctcagctgagaattctactttggctcttgaaggacatcttaggaggagctttccacgcagtgattcctgagtgtgacgcaagcacaggcaggatgca

SEQ ID NO: 43751 - DNA, 201 bp, Homo sapiens
ctagcacaaatccaaattctccctcggggtcacacagggtcacaacctctttgtaccaagttttcttgctacaaatcaaactgccttccagcctcaagtcyctctgtctcccaagtggagattagttgcattccaccaagtctgtttttgttcctggaccactcacacttcctgctgactctggggcagaaaacgggcttt

SEQ ID NO: 43752 - DNA, 201 bp, Homo sapiens
gcctcatgttatgaggctttctccggccacccctcccctccattgcctctgggtctttgttcagaagcaaggcacaccacctgtaaggcagctacaagccygtggagctactggggccagccgaaatgtctctggtttctgtagaggcctgagggctccccaacctcctggctagacttggggattccccaggaggtggaa

SEQ ID NO: 43753 - DNA, 201 bp, Homo sapiens
accctcttctttcacatgcccgtctcaaaagcacatcatgaaatgatgttttctaaatagatgtctgtgggatttcctcgattgcttcctggtgactcccrgttggtgacacccacttcaggtcctgggcaatgctgggtgaagtcagaagtgaggctactggtgccccatggggtcctcagctgcaaattacaaggcatt

SEQ ID NO: 43754 - DNA, 201 bp, Homo sapiens
caagaacccaggggcccccagggtggtggaggggagagtgtgagctttgtcccagtcttgctgatggttttcagcccatttcttcctctgtacacaaaggkaaggcaagatgcgctctgcaaagaaggaggtcttccctgctttcattccatcagcaaatttactaaagaccatctgtgagccaggtactgtttttggcac

SEQ ID NO: 43755 - DNA, 201 bp, Homo sapiens
aggtggaccccagcagaacttgagcaaggactttctactcaccagccagcatcctccaatcacaggattggatatggcaggaggactggttttggcccagraagggcttctgcagggctggaggttgtgttgttatcattgtggccaccatcttcaagacgttgagtgtttactagattgtaggcgctgtgctaaccacgc

SEQ ID NO: 43756 - DNA, 201 bp, Homo sapiens
aggcacatccctatgtgtccatgccttcaggagttatatgctgttggactacgaaaacaggtaaaggaaaaaaggccagtaggtacaggtatgtgcaaggkacacacagagacacatgacctggtaatactgctcttatgttacatgatgatcacttcaccctctcaacaacttcctggtcgacaaaagtgtggctggaca

SEQ ID NO: 43757 - DNA, 201 bp, Homo sapiens
tattctcagccctgcaagagacccatggaaatcagattcctaaaaatccagaaaagttacatggacctctgctgtctcatgtagttgcttctgactctcgrcaaagcaattttgcgctccccaagttgtggggcgaaactgtccaccagcgggccagtcatgtttttggttgcgtctgtcggtacttttgtcatcaatgca

SEQ ID NO: 43758 - DNA, 201 bp, Homo sapiens
gtagttgcttctgactctcggcaaagcaattttgcgctccccaagttgtggggcgaaactgtccaccagcgggccagtcatgtttttggttgcgtctgtcrgtacttttgtcatcaatgcatatgaaatgaagctgtttctggtttttcaattactgggccagggaccaggcctccctgactgttctgttcctgagttact

SEQ ID NO: 43759 - DNA, 201 bp, Homo sapiens
agaagagatggatttgagcagtcccacctcctatgtctgccctgctcccgtaaccacaccaagaagcaagaagacagaacaaggcacagagcagcagccargaaaagaaaaatcctgcaccaggaatgagactcatggcctgggggtccctcgccctctcgcctagactcagccccctctgtcccagcatctctgacatca

SEQ ID NO: 43760 - DNA, 201 bp, Homo sapiens
gccccctcggccgcctgctcctgcccagggcttccagggcttggaccctgcagtgctgtcggggccacagtcccctcgccagggccagccacagtctcctmgccagggccagccacagtctcttcacagtccccctcagatctggctgcagtgggggcctgggacacgccgcgcctgccagcatccccagactgggagcaa

SEQ ID NO: 43761 - DNA, 201 bp, Homo sapiens
atagagtgctatctattcccccactctctagatggggacactgaaggtctcagaggtgacatctcctaagtggcagatccagatttcagcccaggcattcragcccacagtttgagctcttaacccctacaaagggatctgttcctcctccacgtgacaatttggatgagtgggccccaggccccattcctctctaaaccc

SEQ ID NO: 43762 - DNA, 201 bp, Homo sapiens
tggtatctgtttcttcagtctgctcatagaggacagccgcagtgtacaaggacatcagcacacggaccccttgttcaccacctgtccccttactatcttaytcttggcaacttatccatgacaataggatgggatatgtttttctctgatttgggactttgattttgttggcagtggtgggatggcttggggactgtgggg

SEQ ID NO: 43763 - DNA, 201 bp, Homo sapiens
caggatgcatgagacagaattttaaacagatcacagggtgttggttgagactctcagacatgtctcaagtcatcacttcctccccagccagtgctccgggrtttggtaaacaggcaacgaatgaaagagatggtttccaaatcctctcccacctgcccaccaccccaggttcctgtctgtcattccattagctttcttctt

SEQ ID NO: 43764 - DNA, 201 bp, Homo sapiens
tcgtctgcacttcatttttgaggtgccgatgacacaaggtaggtaagtgagccccatgaaagctgctaccaagggctcagaggttatggggcttggggatraaggtgaccgtgaggaacctgaatcaagacggctccgggacacggtggcaaaggtgcctttccaggcttccaggggcttgcattcacaaccatctctgag

SEQ ID NO: 43765 - DNA, 201 bp, Homo sapiens
gcagcgcctggatcggtggtgctcaggggccccctcggccgcctgctcctgcccagggcttccagggcttggaccctgcagtgctgtcggggccacagtcycctcgccagggccagccacagtctcctcgccagggccagccacagtctcttcacagtccccctcagatctggctgcagtgggggcctgggacacgccgcg

SEQ ID NO: 43766 - DNA, 201 bp, Homo sapiens
agaaggcagattgaggggctcctaagctgagtgtgcagacccctcaacacccgccacccccaaacacctgaggaggggggtggagcaagcaaaatgtctgmaaagtttccaaagctctgcgcagtttctgaaaagtttccaagctatctgcacactctgtgaaaagcttgcaagctatctgcacccgttgaaaacttgcat

SEQ ID NO: 43767 - DNA, 201 bp, Homo sapiens
acccctcaacacccgccacccccaaacacctgaggaggggggtggagcaagcaaaatgtctgcaaagtttccaaagctctgcgcagtttctgaaaagtttscaagctatctgcacactctgtgaaaagcttgcaagctatctgcacccgttgaaaacttgcatgcattttgcatactttctgcaaactttgccagggtttg

SEQ ID NO: 43768 - DNA, 201 bp, Homo sapiens
cctgaggaggggggtggagcaagcaaaatgtctgcaaagtttccaaagctctgcgcagtttctgaaaagtttccaagctatctgcacactctgtgaaaagyttgcaagctatctgcacccgttgaaaacttgcatgcattttgcatactttctgcaaactttgccagggtttggcacagcctctgaatagttcgcaaactt

SEQ ID NO: 43769 - DNA, 201 bp, Homo sapiens
gcagtttctgaaaagtttccaagctatctgcacactctgtgaaaagcttgcaagctatctgcacccgttgaaaacttgcatgcattttgcatactttctgmaaactttgccagggtttggcacagcctctgaatagttcgcaaactttctgaaaagtccccagtttcatgaaaaattgaccaagtcggcccaggcagcagg

SEQ ID NO: 43770 - DNA, 201 bp, Homo sapiens
gcaggtctccagccagtgcgcgggctgcaactcccggagcccgtgcgggtagtcgttgcgcgccgcttctgctccccagccctcccccaggcgtcttcacragtgcagagcccaggcaagagtttgctccccgcgacgcacatcttctccgcgcctcgggtcccccgccctgggtccttttgtgtgcgctcgcgccaggag

SEQ ID NO: 43771 - DNA, 201 bp, Homo sapiens
tggagtgaggtcctcctgggaatgagcagatgtgggcctggtccgggagccacgttcctcaccacaaaaggctgacttactcgggagtgttgatccaaatyatgtccaggtggcaatagtagacacactccttgtccttgtaggtgaagcacgtgcagcgcctggatcggtggtgctcaggggccccctcggccgcctgct

SEQ ID NO: 43772 - DNA, 201 bp, Homo sapiens
aaaaaactcaaaagaaatggcattcctgctggattaagtttagtgtggcttgatccagggcagcctgggaagccggcctgggcatcttgataggagctgakcagactgttgggattaggagagacttggcagctcactgtcctggagcggctgatgtctgcaccttccagagggtcacagagaggcaacagcacctcctgg

SEQ ID NO: 43773 - DNA, 201 bp, Homo sapiens
aatacggcgaccctatgagggatgctccgctgcaccatcaactctcttttcagattacaggtcaaggacagcttcttggggaaaactctgacctctcaggytaggttgagtcacccattgctgatgctccggagaagacccaggacttctccttagagcatacttcagcatttctgaagataccactttctctgatcctgt

SEQ ID NO: 43774 - DNA, 201 bp, Homo sapiens
gggaggagcacagtggggctctttgctgggtgcttcacagctcagtcagccattggataaacaggttttcagtcttcagccaggctctgaggggctggtcygccatgaaatgtggttcgagctgacatccccgttatgggtcactttaggtgtcaacttggctaggatactgtgcccagttgtttagtcaaacagcagcct

SEQ ID NO: 43775 - DNA, 201 bp, Homo sapiens
aaatttggttcctctttggggcgatggacttttgggaagatatcacagaagttatgggcaacatccccaagaaaaactctcttgcccacccctgtctacarggatgtgcaggcccctgaagagcagccaggcacctggagaaagaggcctcctgtgtgggagaaggcactggagatttaggggctcagcaacagcaaagat

SEQ ID NO: 43776 - DNA, 201 bp, Homo sapiens
aaaaatcactgaaagaatctccaacattcttcagcatccactatatacgtggtatcaatgtaagtgtcacagggacacagaaaggcacatccctatgtgtycatgccttcaggagttatatgctgttggactacgaaaacaggtaaaggaaaaaaggccagtaggtacaggtatgtgcaaggtacacacagagacacatga

SEQ ID NO: 43777 - DNA, 201 bp, Homo sapiens
gcatccactatatacgtggtatcaatgtaagtgtcacagggacacagaaaggcacatccctatgtgtccatgccttcaggagttatatgctgttggactaygaaaacaggtaaaggaaaaaaggccagtaggtacaggtatgtgcaaggtacacacagagacacatgacctggtaatactgctcttatgttacatgatgat

SEQ ID NO: 43778 - DNA, 201 bp, Homo sapiens
gctccccgcgacgcacatcttctccgcgcctcgggtcccccgccctgggtccttttgtgtgcgctcgcgccaggagaggcgcgccgccccgtgcgcttacytgcggcggaggtcactgtgagcccgaaaaggagccacagccccggctccatgaacctagatcaggcgccggagcaccggaccaggaggacggccgcttgt

SEQ ID NO: 43779 - DNA, 201 bp, Homo sapiens
gtgtgcgctcgcgccaggagaggcgcgccgccccgtgcgcttacctgcggcggaggtcactgtgagcccgaaaaggagccacagccccggctccatgaacytagatcaggcgccggagcaccggaccaggaggacggccgcttgtggccgcgaaagggcactggggccgggtacagctggcctcgccctccagctgtgggg

SEQ ID NO: 43780 - DNA, 201 bp, Homo sapiens
gctgtggctcgggcttttctggcttctgcaccacccccgtcgcctccccgccccccagaggggctggaactgcctcgccgggcctttgaacccgggcgcamtgggggtcgcctcccaggcgctggggggagctggccaggagcgcagcggcccgaggcgcacccaggacagcgaggggcgggggcggcgtggcgtggcgcg

SEQ ID NO: 43781 - DNA, 201 bp, Homo sapiens
ggggtgttatcttttctatcaggggctgagggaaagacacatttctcattgttccccgagtgacaccttccccttgaagagcctgcttgccaaggaactcrgtgtactttacactcttgactcacgcctcgggctggctccctacctctcccaggagttcagagcctgcgtgtggggcagtggcctgggagcaaagtcaac

SEQ ID NO: 43782 - DNA, 201 bp, Homo sapiens
gagcagagactcaaagaggcgaacccacgcagtcatgggaagtgttccacacaggtggaagtacacggtaggaatggacttcctgggttctgggaggagcratacggcgaccctatgagggatgctccgctgcaccatcaactctcttttcagattacaggtcaaggacagcttcttggggaaaactctgacctctcaggc

SEQ ID NO: 43783 - DNA, 201 bp, Homo sapiens
ttggctttaaaaaaaaaaaaaaagaaaaaaaaaaccttagaattaaactcttagttactgagatgtcgcaactcacatcactatgaaagtcatgtaaaagsgttctgtgtttgtccctttattcattcaactacttattaagcacctactgggagtcagacactttttctaagtactaagattacccctgggaacaagatg

SEQ ID NO: 43784 - DNA, 201 bp, Homo sapiens
ggaggaaatgggaatcatttggctttaaaaaaaaaaaaaaagaaaaaaaaaaccttagaattaaactcttagttactgagatgtcgcaactcacatcactrtgaaagtcatgtaaaagggttctgtgtttgtccctttattcattcaactacttattaagcacctactgggagtcagacactttttctaagtactaagatt

SEQ ID NO: 43785 - DNA, 201 bp, Homo sapiens
aagaaatttcacaattgtgtttttaatgagctcaaaccactttagcaggacacagttaaacaaaagagtaacacaatcaagcccggaagtcataattcagrttcagaaatgcagggggggcaggatttgacctggtaccttctcagagacgtaggactccgagagagcaaaatctcctgccggaacgtgctgatggattgg

SEQ ID NO: 43786 - DNA, 201 bp, Homo sapiens
aaccatgcagggaagagagaaagagtggccatttggaccccgaagcagcacattatacaaccatccaatgcaatgctaacctggagcctcatacccatagwcagaccacttcctgatggaagggcacagattccatctctcaacagcacccagcccttgggggaaaaaggtaaaggaagtcgatttgtttttggaatctct

SEQ ID NO: 43787 - DNA, 201 bp, Homo sapiens
aataaatgcttagtttttttctagaaagtctgaaatttcacagttctagcaggcaagacataagtgctcgttcaaaaccatctctggtgggagtagaaacyatgcagggaagagagaaagagtggccatttggaccccgaagcagcacattatacaaccatccaatgcaatgctaacctggagcctcatacccatagacag

SEQ ID NO: 43788 - DNA, 19 bp, Homo sapiens
gatggagttttgaggaacc

SEQ ID NO: 43789 - DNA, 20 bp, Homo sapiens
cgatggagttttgaggaact

SEQ ID NO: 43790 - DNA, 17 bp, Homo sapiens
ccctgggcagaatcaga

SEQ ID NO: 43791 - DNA, 17 bp, Homo sapiens
cgcaggttgaattctcg

SEQ ID NO: 43792 - DNA, 19 bp, Homo sapiens
gtcgcaggttgaattctct

SEQ ID NO: 43793 - DNA, 18 bp, Homo sapiens
ggatagcccgctgactct

SEQ ID NO: 43794 - DNA, 21 bp, Homo sapiens
ttccagggtatatctcagagc

SEQ ID NO: 43795 - DNA, 22 bp, Homo sapiens
gttccagggtatatctcagaga

SEQ ID NO: 43796 - DNA, 22 bp, Homo sapiens
ttgaaagagtgtgagcaagatc

SEQ ID NO: 43797 - DNA, 19 bp, Homo sapiens
gccgaaaaataaaatgcag

SEQ ID NO: 43798 - DNA, 19 bp, Homo sapiens
gccgaaaaataaaatgcac

SEQ ID NO: 43799 - DNA, 20 bp, Homo sapiens
ggcacaggaggtgttatgac

SEQ ID NO: 43800 - DNA, 17 bp, Homo sapiens
ggcgacgaagtgctaca

SEQ ID NO: 43801 - DNA, 16 bp, Homo sapiens
gcgacgaagtgctacg

SEQ ID NO: 43802 - DNA, 20 bp, Homo sapiens
ttgtcatggttgcattgatc

SEQ ID NO: 43803 - DNA, 19 bp, Homo sapiens
cacctttcagggttgaagt

SEQ ID NO: 43804 - DNA, 18 bp, Homo sapiens
acctttcagggttgaagg

SEQ ID NO: 43805 - DNA, 17 bp, Homo sapiens
ctgtccccagcctcatt

SEQ ID NO: 43806 - DNA, 16 bp, Homo sapiens
accgtgcacttcccac

SEQ ID NO: 43807 - DNA, 16 bp, Homo sapiens
accgtgcacttcccat

SEQ ID NO: 43808 - DNA, 17 bp, Homo sapiens
tctccgcaccaagaatg

SEQ ID NO: 43809 - DNA, 20 bp, Homo sapiens
gacagattgtcacggaacac

SEQ ID NO: 43810 - DNA, 20 bp, Homo sapiens
gacagattgtcacggaacat

SEQ ID NO: 43811 - DNA, 22 bp, Homo sapiens
ggctcaggactctctgctagta

SEQ ID NO: 43812 - DNA, 14 bp, Homo sapiens
ccctgcccccagaa

SEQ ID NO: 43813 - DNA, 14 bp, Homo sapiens
ccctgcccccagac

SEQ ID NO: 43814 - DNA, 22 bp, Homo sapiens
ctcatcatgggttggattagta

SEQ ID NO: 43815 - DNA, 24 bp, Homo sapiens
ttattcctagttccaatgaaagat

SEQ ID NO: 43816 - DNA, 24 bp, Homo sapiens
ttattcctagttccaatgaaagac

SEQ ID NO: 43817 - DNA, 20 bp, Homo sapiens
atcagagcctgggttctaag

SEQ ID NO: 43818 - DNA, 21 bp, Homo sapiens
gtatccaagaaagttcttccc

SEQ ID NO: 43819 - DNA, 21 bp, Homo sapiens
gtatccaagaaagttcttccg

SEQ ID NO: 43820 - DNA, 24 bp, Homo sapiens
gagttatcaaaatgaacctgtctc

SEQ ID NO: 43821 - DNA, 22 bp, Homo sapiens
cagttttggtgtcaactagaaa

SEQ ID NO: 43822 - DNA, 22 bp, Homo sapiens
cagttttggtgtcaactagaag

SEQ ID NO: 43823 - DNA, 23 bp, Homo sapiens
ttgcaacctgaaaaacataacta

SEQ ID NO: 43824 - DNA, 16 bp, Homo sapiens
ggtctcagcgtcaccc

SEQ ID NO: 43825 - DNA, 17 bp, Homo sapiens
cggtctcagcgtcacct

SEQ ID NO: 43826 - DNA, 15 bp, Homo sapiens
cgcctccccaccatc

SEQ ID NO: 43827 - DNA, 18 bp, Homo sapiens
gaactgtccgtcatcggt

SEQ ID NO: 43828 - DNA, 16 bp, Homo sapiens
actgtccgtcatcggc

SEQ ID NO: 43829 - DNA, 20 bp, Homo sapiens
ttgctagtggcatgactgtc

SEQ ID NO: 43830 - DNA, 18 bp, Homo sapiens
gtgtggattggtgctacc

SEQ ID NO: 43831 - DNA, 19 bp, Homo sapiens
ggtgtggattggtgctact

SEQ ID NO: 43832 - DNA, 19 bp, Homo sapiens
catgcgggatccatagtct

SEQ ID NO: 43833 - DNA, 14 bp, Homo sapiens
agggggttgcgtgg

SEQ ID NO: 43834 - DNA, 15 bp, Homo sapiens
cagggggttgcgtgt

SEQ ID NO: 43835 - DNA, 16 bp, Homo sapiens
ggcgcccaggaactag

SEQ ID NO: 43836 - DNA, 15 bp, Homo sapiens
gcatggccgacagac

SEQ ID NO: 43837 - DNA, 15 bp, Homo sapiens
gcatggccgacagat

SEQ ID NO: 43838 - DNA, 18 bp, Homo sapiens
ccaacccgtgtgacatct

SEQ ID NO: 43839 - DNA, 18 bp, Homo sapiens
gccagaacgcagagtacg

SEQ ID NO: 43840 - DNA, 19 bp, Homo sapiens
tgccagaacgcagagtaca

SEQ ID NO: 43841 - DNA, 25 bp, Homo sapiens
gcattttagtttgttcatgactttg

SEQ ID NO: 43842 - DNA, 16 bp, Homo sapiens
caagcccctgtgatgc

SEQ ID NO: 43843 - DNA, 16 bp, Homo sapiens
caagcccctgtgatgg

SEQ ID NO: 43844 - DNA, 20 bp, Homo sapiens
tgtgatgctcctcagcttct

SEQ ID NO: 43845 - DNA, 15 bp, Homo sapiens
gggaggcttgttgcc

SEQ ID NO: 43846 - DNA, 16 bp, Homo sapiens
tgggaggcttgttgct

SEQ ID NO: 43847 - DNA, 21 bp, Homo sapiens
tctcatgagggtggatttact

SEQ ID NO: 43848 - DNA, 17 bp, Homo sapiens
gaggggcagataggtgc

SEQ ID NO: 43849 - DNA, 17 bp, Homo sapiens
gaggggcagataggtgg

SEQ ID NO: 43850 - DNA, 18 bp, Homo sapiens
cttcgtggcggtgttact

SEQ ID NO: 43851 - DNA, 18 bp, Homo sapiens
gctggtggtgctgtcaac

SEQ ID NO: 43852 - DNA, 18 bp, Homo sapiens
gctggtggtgctgtcaat

SEQ ID NO: 43853 - DNA, 16 bp, Homo sapiens
cccgtggagggtctga

SEQ ID NO: 43854 - DNA, 14 bp, Homo sapiens
tggctgcgattccg

SEQ ID NO: 43855 - DNA, 16 bp, Homo sapiens
agtggctgcgattcca

SEQ ID NO: 43856 - DNA, 18 bp, Homo sapiens
gcaatgggcatgatttca

SEQ ID NO: 43857 - DNA, 18 bp, Homo sapiens
caggcttaaggtccttcc

SEQ ID NO: 43858 - DNA, 19 bp, Homo sapiens
gcaggcttaaggtccttct

SEQ ID NO: 43859 - DNA, 16 bp, Homo sapiens
tccctgcgagcaagaa

SEQ ID NO: 43860 - DNA, 20 bp, Homo sapiens
cagcctcaggagataacagt

SEQ ID NO: 43861 - DNA, 20 bp, Homo sapiens
cagcctcaggagataacaga

SEQ ID NO: 43862 - DNA, 21 bp, Homo sapiens
tcaacccttttccacatagat

SEQ ID NO: 43863 - DNA, 16 bp, Homo sapiens
gcaccggaggacaatg

SEQ ID NO: 43864 - DNA, 16 bp, Homo sapiens
gcaccggaggacaata

SEQ ID NO: 43865 - DNA, 18 bp, Homo sapiens
gggttggctcagtctcaa

SEQ ID NO: 43866 - DNA, 22 bp, Homo sapiens
tgttttcatccacttgaactgt

SEQ ID NO: 43867 - DNA, 20 bp, Homo sapiens
ttttcatccacttgaactgc

SEQ ID NO: 43868 - DNA, 21 bp, Homo sapiens
caattttggctcccttaaaag

SEQ ID NO: 43869 - DNA, 22 bp, Homo sapiens
acaagaagttcacagctgaaga

SEQ ID NO: 43870 - DNA, 21 bp, Homo sapiens
caagaagttcacagctgaagg

SEQ ID NO: 43871 - DNA, 20 bp, Homo sapiens
cctgctggagagacagagtg

SEQ ID NO: 43872 - DNA, 15 bp, Homo sapiens
ccccagctggtgacg

SEQ ID NO: 43873 - DNA, 15 bp, Homo sapiens
ccccagctggtgaca

SEQ ID NO: 43874 - DNA, 18 bp, Homo sapiens
tggttgggactggatctg

SEQ ID NO: 43875 - DNA, 15 bp, Homo sapiens
gactgcccgtcagca

SEQ ID NO: 43876 - DNA, 15 bp, Homo sapiens
gactgcccgtcagcc

SEQ ID NO: 43877 - DNA, 20 bp, Homo sapiens
ggaggtcaggtggatgttta

SEQ ID NO: 43878 - DNA, 16 bp, Homo sapiens
tggctcctttgggatg

SEQ ID NO: 43879 - DNA, 18 bp, Homo sapiens
cttggctcctttgggata

SEQ ID NO: 43880 - DNA, 19 bp, Homo sapiens
cccctgttggagaagatgt

SEQ ID NO: 43881 - DNA, 16 bp, Homo sapiens
cacggcgcactttctt

SEQ ID NO: 43882 - DNA, 16 bp, Homo sapiens
cacggcgcactttctc

SEQ ID NO: 43883 - DNA, 26 bp, Homo sapiens
tgttttttcctttgtcatcttatcta

SEQ ID NO: 43884 - DNA, 17 bp, Homo sapiens
agtggagcttcagggct

SEQ ID NO: 43885 - DNA, 15 bp, Homo sapiens
tggagcttcagggcg

SEQ ID NO: 43886 - DNA, 23 bp, Homo sapiens
cagtggagacagaggatgtttac

SEQ ID NO: 43887 - DNA, 20 bp, Homo sapiens
gcacctctgggtgaagaata

SEQ ID NO: 43888 - DNA, 19 bp, Homo sapiens
cacctctgggtgaagaatg

SEQ ID NO: 43889 - DNA, 18 bp, Homo sapiens
tgacgatgggaggaacag

SEQ ID NO: 43890 - DNA, 22 bp, Homo sapiens
ggtgttaatctcatctggtgac

SEQ ID NO: 43891 - DNA, 22 bp, Homo sapiens
ggtgttaatctcatctggtgag

SEQ ID NO: 43892 - DNA, 19 bp, Homo sapiens
gcagaagcaagcatcatct

SEQ ID NO: 43893 - DNA, 16 bp, Homo sapiens
tcttgccctgctgcac

SEQ ID NO: 43894 - DNA, 16 bp, Homo sapiens
tcttgccctgctgcag

SEQ ID NO: 43895 - DNA, 20 bp, Homo sapiens
gctgcacagtctccacttct

SEQ ID NO: 43896 - DNA, 20 bp, Homo sapiens
caggttaatcaccgaggaac

SEQ ID NO: 43897 - DNA, 20 bp, Homo sapiens
caggttaatcaccgaggaat

SEQ ID NO: 43898 - DNA, 26 bp, Homo sapiens
tcaaactaaagttgagttcagattct

SEQ ID NO: 43899 - DNA, 23 bp, Homo sapiens
gacagatgaacaggaaatagagt

SEQ ID NO: 43900 - DNA, 23 bp, Homo sapiens
gacagatgaacaggaaatagaga

SEQ ID NO: 43901 - DNA, 22 bp, Homo sapiens
aaatcccaggagtgtttgtaat

SEQ ID NO: 43902 - DNA, 25 bp, Homo sapiens
cattatcttgagatttctgcataat

SEQ ID NO: 43903 - DNA, 25 bp, Homo sapiens
cattatcttgagatttctgcataac

SEQ ID NO: 43904 - DNA, 27 bp, Homo sapiens
aacagaaaatgtgtacataaatttgac

SEQ ID NO: 43905 - DNA, 17 bp, Homo sapiens
catcacggagatccacc

SEQ ID NO: 43906 - DNA, 19 bp, Homo sapiens
atcatcacggagatccact

SEQ ID NO: 43907 - DNA, 22 bp, Homo sapiens
tcagctccaaggagattcttag

SEQ ID NO: 43908 - DNA, 20 bp, Homo sapiens
cgtcagcttcttcactgcta

SEQ ID NO: 43909 - DNA, 19 bp, Homo sapiens
gtcagcttcttcactgctg

SEQ ID NO: 43910 - DNA, 25 bp, Homo sapiens
gctttgatttcctactctgatttta

SEQ ID NO: 43911 - DNA, 21 bp, Homo sapiens
cagacttttctggaatgtcaa

SEQ ID NO: 43912 - DNA, 21 bp, Homo sapiens
cagacttttctggaatgtcag

SEQ ID NO: 43913 - DNA, 15 bp, Homo sapiens
gcggcagcctctgtg

SEQ ID NO: 43914 - DNA, 20 bp, Homo sapiens
tgaatgagcatccaaaagaa

SEQ ID NO: 43915 - DNA, 20 bp, Homo sapiens
tgaatgagcatccaaaagac

SEQ ID NO: 43916 - DNA, 18 bp, Homo sapiens
gcagcacgaagcattcat

SEQ ID NO: 43917 - DNA, 21 bp, Homo sapiens
agttgaaagtgttgattttgg

SEQ ID NO: 43918 - DNA, 22 bp, Homo sapiens
cagttgaaagtgttgattttga

SEQ ID NO: 43919 - DNA, 20 bp, Homo sapiens
ctgtgttggcaaggatgtaa

SEQ ID NO: 43920 - DNA, 16 bp, Homo sapiens
aagatgggcgtgatgg

SEQ ID NO: 43921 - DNA, 17 bp, Homo sapiens
aaagatgggcgtgatga

SEQ ID NO: 43922 - DNA, 25 bp, Homo sapiens
aataggacatcagtctcctcatatc

SEQ ID NO: 43923 - DNA, 18 bp, Homo sapiens
gcatattgaattgctccg

SEQ ID NO: 43924 - DNA, 19 bp, Homo sapiens
tgcatattgaattgctcca

SEQ ID NO: 43925 - DNA, 23 bp, Homo sapiens
cagtatgccaataatccaagagt

SEQ ID NO: 43926 - DNA, 19 bp, Homo sapiens
ggagctgtggacttaaccg

SEQ ID NO: 43927 - DNA, 19 bp, Homo sapiens
ggagctgtggacttaacca

SEQ ID NO: 43928 - DNA, 21 bp, Homo sapiens
gaggtagcccagttcaacttt

SEQ ID NO: 43929 - DNA, 18 bp, Homo sapiens
tccttttcccttgcagat

SEQ ID NO: 43930 - DNA, 18 bp, Homo sapiens
tccttttcccttgcagac

SEQ ID NO: 43931 - DNA, 20 bp, Homo sapiens
cacaataggctcggattcat

SEQ ID NO: 43932 - DNA, 19 bp, Homo sapiens
tccctggctgttatcttca

SEQ ID NO: 43933 - DNA, 18 bp, Homo sapiens
ccctggctgttatcttcg

SEQ ID NO: 43934 - DNA, 20 bp, Homo sapiens
gaggatgggcacactcatac

SEQ ID NO: 43935 - DNA, 20 bp, Homo sapiens
actaccatgcacagtaagcc

SEQ ID NO: 43936 - DNA, 21 bp, Homo sapiens
cactaccatgcacagtaagct

SEQ ID NO: 43937 - DNA, 22 bp, Homo sapiens
gtacaaagggatttttgaacaa

SEQ ID NO: 43938 - DNA, 22 bp, Homo sapiens
ccttcctgcataccattattat

SEQ ID NO: 43939 - DNA, 22 bp, Homo sapiens
ccttcctgcataccattattac

SEQ ID NO: 43940 - DNA, 23 bp, Homo sapiens
acttcctccaagaagaaatacag

SEQ ID NO: 43941 - DNA, 15 bp, Homo sapiens
tgggctccatcccac

SEQ ID NO: 43942 - DNA, 15 bp, Homo sapiens
tgggctccatcccat

SEQ ID NO: 43943 - DNA, 24 bp, Homo sapiens
ccaattctttttcttctttcagtt

SEQ ID NO: 43944 - DNA, 22 bp, Homo sapiens
tcaaagtcattaattgggatca

SEQ ID NO: 43945 - DNA, 21 bp, Homo sapiens
caaagtcattaattgggatcg

SEQ ID NO: 43946 - DNA, 22 bp, Homo sapiens
ggtggaagtctctctgctaact

SEQ ID NO: 43947 - DNA, 24 bp, Homo sapiens
actagagatggatgaacttttctc

SEQ ID NO: 43948 - DNA, 24 bp, Homo sapiens
actagagatggatgaacttttctt

SEQ ID NO: 43949 - DNA, 23 bp, Homo sapiens
gttctccagaaagcattctttat

SEQ ID NO: 43950 - DNA, 15 bp, Homo sapiens
cccccagcaatggac

SEQ ID NO: 43951 - DNA, 15 bp, Homo sapiens
cccccagcaatggat

SEQ ID NO: 43952 - DNA, 22 bp, Homo sapiens
ggagatccccctgattaatata

SEQ ID NO: 43953 - DNA, 15 bp, Homo sapiens
tggggcccatgagac

SEQ ID NO: 43954 - DNA, 16 bp, Homo sapiens
atggggcccatgagat

SEQ ID NO: 43955 - DNA, 22 bp, Homo sapiens
cccagggaagatgtagactatc

SEQ ID NO: 43956 - DNA, 17 bp, Homo sapiens
gccctctgctggaactc

SEQ ID NO: 43957 - DNA, 17 bp, Homo sapiens
gccctctgctggaactg

SEQ ID NO: 43958 - DNA, 17 bp, Homo sapiens
gacccgcaaacctgaga

SEQ ID NO: 43959 - DNA, 17 bp, Homo sapiens
ctgtcagtcctttcgca

SEQ ID NO: 43960 - DNA, 16 bp, Homo sapiens
tgtcagtcctttcgcg

SEQ ID NO: 43961 - DNA, 20 bp, Homo sapiens
agctgttcctgcaaagttct

SEQ ID NO: 43962 - DNA, 16 bp, Homo sapiens
gggcctcaccagagac

SEQ ID NO: 43963 - DNA, 16 bp, Homo sapiens
gggcctcaccagagag

SEQ ID NO: 43964 - DNA, 19 bp, Homo sapiens
ccagaatgccatcaagaca

SEQ ID NO: 43965 - DNA, 20 bp, Homo sapiens
gcgagtgcagatgtgtttag

SEQ ID NO: 43966 - DNA, 20 bp, Homo sapiens
gcgagtgcagatgtgtttaa

SEQ ID NO: 43967 - DNA, 24 bp, Homo sapiens
gaacagcagtgttttatcatcatt

SEQ ID NO: 43968 - DNA, 17 bp, Homo sapiens
aaggcaggatgggagtg

SEQ ID NO: 43969 - DNA, 18 bp, Homo sapiens
aaaggcaggatgggagtt

SEQ ID NO: 43970 - DNA, 22 bp, Homo sapiens
cgtcaaagcactaatgtcatgt

SEQ ID NO: 43971 - DNA, 22 bp, Homo sapiens
ccctgtactttcataagatgct

SEQ ID NO: 43972 - DNA, 21 bp, Homo sapiens
cctgtactttcataagatgcc

SEQ ID NO: 43973 - DNA, 18 bp, Homo sapiens
cgacgccaaggtgatact

SEQ ID NO: 43974 - DNA, 22 bp, Homo sapiens
ctcaatgtcgtattcaccttct

SEQ ID NO: 43975 - DNA, 20 bp, Homo sapiens
caatgtcgtattcaccttcc

SEQ ID NO: 43976 - DNA, 24 bp, Homo sapiens
actccaggatttttcaaagattat

SEQ ID NO: 43977 - DNA, 21 bp, Homo sapiens
cacacttctccattcttcaca

SEQ ID NO: 43978 - DNA, 20 bp, Homo sapiens
acacttctccattcttcacg

SEQ ID NO: 43979 - DNA, 26 bp, Homo sapiens
gaatcttttccttactcttgactcta

SEQ ID NO: 43980 - DNA, 18 bp, Homo sapiens
tgtggtctgtgagcaacg

SEQ ID NO: 43981 - DNA, 19 bp, Homo sapiens
ctgtggtctgtgagcaaca

SEQ ID NO: 43982 - DNA, 17 bp, Homo sapiens
gggatcccgaggaagag

SEQ ID NO: 43983 - DNA, 16 bp, Homo sapiens
ccccaggttgcatagc

SEQ ID NO: 43984 - DNA, 16 bp, Homo sapiens
ccccaggttgcatagg

SEQ ID NO: 43985 - DNA, 21 bp, Homo sapiens
gacacagcagtgtgaagatgt

SEQ ID NO: 43986 - DNA, 17 bp, Homo sapiens
tgccagcagtatggacg

SEQ ID NO: 43987 - DNA, 19 bp, Homo sapiens
aatgccagcagtatggaca

SEQ ID NO: 43988 - DNA, 18 bp, Homo sapiens
ccatccagcctcaggaac

SEQ ID NO: 43989 - DNA, 16 bp, Homo sapiens
gggaccggatcagcac

SEQ ID NO: 43990 - DNA, 16 bp, Homo sapiens
gggaccggatcagcat

SEQ ID NO: 43991 - DNA, 24 bp, Homo sapiens
ggcagtaggatgaattagaaagtg

SEQ ID NO: 43992 - DNA, 16 bp, Homo sapiens
aggaggctgcgtatcc

SEQ ID NO: 43993 - DNA, 17 bp, Homo sapiens
caggaggctgcgtatct

SEQ ID NO: 43994 - DNA, 21 bp, Homo sapiens
gtagctgtgcagtgacagtgt

SEQ ID NO: 43995 - DNA, 20 bp, Homo sapiens
ctgtaggcttcatcctccat

SEQ ID NO: 43996 - DNA, 19 bp, Homo sapiens
tgtaggcttcatcctccaa

SEQ ID NO: 43997 - DNA, 22 bp, Homo sapiens
gggagagttcaaagcaagtatt

SEQ ID NO: 43998 - DNA, 16 bp, Homo sapiens
caccctggctggagag

SEQ ID NO: 43999 - DNA, 16 bp, Homo sapiens
caccctggctggagaa

SEQ ID NO: 44000 - DNA, 19 bp, Homo sapiens
ctccctgtcccaaaaagac

SEQ ID NO: 44001 - DNA, 17 bp, Homo sapiens
tgcaggggactggagtc

SEQ ID NO: 44002 - DNA, 17 bp, Homo sapiens
tgcaggggactggagtt

SEQ ID NO: 44003 - DNA, 18 bp, Homo sapiens
cccttgcagggcttctac

SEQ ID NO: 44004 - DNA, 18 bp, Homo sapiens
cctcactgccagtgaagc

SEQ ID NO: 44005 - DNA, 21 bp, Homo sapiens
atacctcactgccagtgaagt

SEQ ID NO: 44006 - DNA, 20 bp, Homo sapiens
ggagcaccagcaactgttag

SEQ ID NO: 44007 - DNA, 17 bp, Homo sapiens
cattgctggtttccacg

SEQ ID NO: 44008 - DNA, 17 bp, Homo sapiens
cattgctggtttccaca

SEQ ID NO: 44009 - DNA, 18 bp, Homo sapiens
ggcagtggcacacaatct

SEQ ID NO: 44010 - DNA, 15 bp, Homo sapiens
gcgcccgaactcttc

SEQ ID NO: 44011 - DNA, 15 bp, Homo sapiens
gcgcccgaactcttt

SEQ ID NO: 44012 - DNA, 17 bp, Homo sapiens
tggccaacgtcatgagt

SEQ ID NO: 44013 - DNA, 19 bp, Homo sapiens
tggagcatcttggagtttc

SEQ ID NO: 44014 - DNA, 19 bp, Homo sapiens
tggagcatcttggagtttt

SEQ ID NO: 44015 - DNA, 17 bp, Homo sapiens
ctgctggagcgtgagaa

SEQ ID NO: 44016 - DNA, 19 bp, Homo sapiens
cgaagtcgctcaaagtctg

SEQ ID NO: 44017 - DNA, 19 bp, Homo sapiens
cgaagtcgctcaaagtctc

SEQ ID NO: 44018 - DNA, 25 bp, Homo sapiens
gatactgacattttgactggtgtta

SEQ ID NO: 44019 - DNA, 17 bp, Homo sapiens
gcagacctgcagcttca

SEQ ID NO: 44020 - DNA, 16 bp, Homo sapiens
cagacctgcagcttcg

SEQ ID NO: 44021 - DNA, 24 bp, Homo sapiens
tgtaacccatcaactctgtttatc

SEQ ID NO: 44022 - DNA, 21 bp, Homo sapiens
gttcacagagtgtttccaaag

SEQ ID NO: 44023 - DNA, 21 bp, Homo sapiens
gttcacagagtgtttccaaat

SEQ ID NO: 44024 - DNA, 19 bp, Homo sapiens
tggtccccttgagagactt

SEQ ID NO: 44025 - DNA, 15 bp, Homo sapiens
gcgctgcagggtcat

SEQ ID NO: 44026 - DNA, 15 bp, Homo sapiens
gcgctgcagggtcac

SEQ ID NO: 44027 - DNA, 18 bp, Homo sapiens
cctccccgcagagaatta

SEQ ID NO: 44028 - DNA, 15 bp, Homo sapiens
tgagcccacagaccg

SEQ ID NO: 44029 - DNA, 16 bp, Homo sapiens
ctgagcccacagaccc

SEQ ID NO: 44030 - DNA, 19 bp, Homo sapiens
gccagactcagcactcatt

SEQ ID NO: 44031 - DNA, 21 bp, Homo sapiens
ccaatagtcgttttttgttgg

SEQ ID NO: 44032 - DNA, 21 bp, Homo sapiens
ccaatagtcgttttttgttgc

SEQ ID NO: 44033 - DNA, 20 bp, Homo sapiens
gctgtgtgggaagtcagaac

SEQ ID NO: 44034 - DNA, 19 bp, Homo sapiens
cttattttcagcgaaaggc

SEQ ID NO: 44035 - DNA, 20 bp, Homo sapiens
ccttattttcagcgaaagga

SEQ ID NO: 44036 - DNA, 18 bp, Homo sapiens
ccaatggtcgtcatctcc

SEQ ID NO: 44037 - DNA, 22 bp, Homo sapiens
ggagccacctatgttctctact

SEQ ID NO: 44038 - DNA, 21 bp, Homo sapiens
gagccacctatgttctctacc

SEQ ID NO: 44039 - DNA, 20 bp, Homo sapiens
tccctctttgctcattcatc

SEQ ID NO: 44040 - DNA, 24 bp, Homo sapiens
ctgtcctgtgtgcattatagatat

SEQ ID NO: 44041 - DNA, 24 bp, Homo sapiens
ctgtcctgtgtgcattatagatag

SEQ ID NO: 44042 - DNA, 20 bp, Homo sapiens
aaccaggcctcaagactcta

SEQ ID NO: 44043 - DNA, 19 bp, Homo sapiens
ccttgcctttctttttagc

SEQ ID NO: 44044 - DNA, 20 bp, Homo sapiens
cccttgcctttctttttagt

SEQ ID NO: 44045 - DNA, 23 bp, Homo sapiens
gcctcaaagaaagtgacatctat

SEQ ID NO: 44046 - DNA, 22 bp, Homo sapiens
gctttatcagagactctgaagc

SEQ ID NO: 44047 - DNA, 22 bp, Homo sapiens
gctttatcagagactctgaagg

SEQ ID NO: 44048 - DNA, 17 bp, Homo sapiens
ccaaggccacggatatc

SEQ ID NO: 44049 - DNA, 17 bp, Homo sapiens
gtccttccaagcagcat

SEQ ID NO: 44050 - DNA, 17 bp, Homo sapiens
gtccttccaagcagcag

SEQ ID NO: 44051 - DNA, 16 bp, Homo sapiens
gggtgcggtcattgaa

SEQ ID NO: 44052 - DNA, 17 bp, Homo sapiens
tcggtgggggttgttta

SEQ ID NO: 44053 - DNA, 16 bp, Homo sapiens
cggtgggggttgtttt

SEQ ID NO: 44054 - DNA, 22 bp, Homo sapiens
gcctgaaactttttggaattat

SEQ ID NO: 44055 - DNA, 19 bp, Homo sapiens
tccagtcatttggtccact

SEQ ID NO: 44056 - DNA, 18 bp, Homo sapiens
ccagtcatttggtccacc

SEQ ID NO: 44057 - DNA, 19 bp, Homo sapiens
tggcccattgatttctcta

SEQ ID NO: 44058 - DNA, 16 bp, Homo sapiens
cccctgtgatcccttg

SEQ ID NO: 44059 - DNA, 17 bp, Homo sapiens
gcccctgtgatccctta

SEQ ID NO: 44060 - DNA, 20 bp, Homo sapiens
ccgtgagatcctcaaatgac

SEQ ID NO: 44061 - DNA, 19 bp, Homo sapiens
tctctgtcaatggggtcag

SEQ ID NO: 44062 - DNA, 19 bp, Homo sapiens
tctctgtcaatggggtcaa

SEQ ID NO: 44063 - DNA, 23 bp, Homo sapiens
caaagtgctgatcagaggtatta

SEQ ID NO: 44064 - DNA, 15 bp, Homo sapiens
ggtctcgccttcggg

SEQ ID NO: 44065 - DNA, 15 bp, Homo sapiens
ggtctcgccttcgga

SEQ ID NO: 44066 - DNA, 21 bp, Homo sapiens
agcttccacaaaccagataga

SEQ ID NO: 44067 - DNA, 16 bp, Homo sapiens
ccagtaggcggtcatg

SEQ ID NO: 44068 - DNA, 18 bp, Homo sapiens
gtccagtaggcggtcata

SEQ ID NO: 44069 - DNA, 18 bp, Homo sapiens
ggccgaccatagagatga

SEQ ID NO: 44070 - DNA, 23 bp, Homo sapiens
tggtcttttccagtttatcataa

SEQ ID NO: 44071 - DNA, 23 bp, Homo sapiens
tggtcttttccagtttatcatac

SEQ ID NO: 44072 - DNA, 20 bp, Homo sapiens
gaagaagctgcaggactttg

SEQ ID NO: 44073 - DNA, 19 bp, Homo sapiens
ccgtgtggtatgacatcat

SEQ ID NO: 44074 - DNA, 19 bp, Homo sapiens
ccgtgtggtatgacatcac

SEQ ID NO: 44075 - DNA, 20 bp, Homo sapiens
tgtctgcaggtcacactcat

SEQ ID NO: 44076 - DNA, 20 bp, Homo sapiens
tcttctaggctctgtggtcc

SEQ ID NO: 44077 - DNA, 20 bp, Homo sapiens
tcttctaggctctgtggtca

SEQ ID NO: 44078 - DNA, 16 bp, Homo sapiens
ccacgtgcccatgaag

SEQ ID NO: 44079 - DNA, 16 bp, Homo sapiens
ctgctgggtgtccacc

SEQ ID NO: 44080 - DNA, 15 bp, Homo sapiens
tgctgggtgtccacg

SEQ ID NO: 44081 - DNA, 20 bp, Homo sapiens
aggagctgaggaagatctca

SEQ ID NO: 44082 - DNA, 18 bp, Homo sapiens
gtttcctggaagtggatc

SEQ ID NO: 44083 - DNA, 19 bp, Homo sapiens
ggtttcctggaagtggatt

SEQ ID NO: 44084 - DNA, 19 bp, Homo sapiens
gggttgggagagttctttc

SEQ ID NO: 44085 - DNA, 18 bp, Homo sapiens
gctttgtggcctaccaag

SEQ ID NO: 44086 - DNA, 18 bp, Homo sapiens
gctttgtggcctaccaaa

SEQ ID NO: 44087 - DNA, 21 bp, Homo sapiens
tccagtgagcaagtctactca

SEQ ID NO: 44088 - DNA, 22 bp, Homo sapiens
cggtttaccttgacattatttc

SEQ ID NO: 44089 - DNA, 22 bp, Homo sapiens
cggtttaccttgacattatttt

SEQ ID NO: 44090 - DNA, 21 bp, Homo sapiens
actgttgccccttatctatgt

SEQ ID NO: 44091 - DNA, 18 bp, Homo sapiens
tccgttgttctcagggat

SEQ ID NO: 44092 - DNA, 18 bp, Homo sapiens
tccgttgttctcagggac

SEQ ID NO: 44093 - DNA, 18 bp, Homo sapiens
ggttcctggaggcatgtc

SEQ ID NO: 44094 - DNA, 21 bp, Homo sapiens
tctcatccacaaagaaacttg

SEQ ID NO: 44095 - DNA, 22 bp, Homo sapiens
ctctcatccacaaagaaacttt

SEQ ID NO: 44096 - DNA, 20 bp, Homo sapiens
cccagagttgctctcttgaa

SEQ ID NO: 44097 - DNA, 26 bp, Homo sapiens
cacattaataactggaagtaaaactg

SEQ ID NO: 44098 - DNA, 26 bp, Homo sapiens
cacattaataactggaagtaaaactc

SEQ ID NO: 44099 - DNA, 20 bp, Homo sapiens
ggtctccgtgctcttagtct

SEQ ID NO: 44100 - DNA, 18 bp, Homo sapiens
caaaccttcgagctgcta

SEQ ID NO: 44101 - DNA, 17 bp, Homo sapiens
aaaccttcgagctgctg

SEQ ID NO: 44102 - DNA, 25 bp, Homo sapiens
ctgttctcatcagagagattgtaga

SEQ ID NO: 44103 - DNA, 17 bp, Homo sapiens
tcagggatggctcttcc

SEQ ID NO: 44104 - DNA, 19 bp, Homo sapiens
agtcagggatggctcttct

SEQ ID NO: 44105 - DNA, 19 bp, Homo sapiens
gggaaggcatgagttgagt

SEQ ID NO: 44106 - DNA, 20 bp, Homo sapiens
gaatgtgggtctcaaccttt

SEQ ID NO: 44107 - DNA, 20 bp, Homo sapiens
gaatgtgggtctcaaccttc

SEQ ID NO: 44108 - DNA, 16 bp, Homo sapiens
tccggtggcatcaaga

SEQ ID NO: 44109 - DNA, 25 bp, Homo sapiens
ccttcaattctgaaaagtagctaat

SEQ ID NO: 44110 - DNA, 25 bp, Homo sapiens
ccttcaattctgaaaagtagctaag

SEQ ID NO: 44111 - DNA, 22 bp, Homo sapiens
tttgaggttgagtgacatgttc

SEQ ID NO: 44112 - DNA, 21 bp, Homo sapiens
gtggctcattaccaatctctt

SEQ ID NO: 44113 - DNA, 21 bp, Homo sapiens
gtggctcattaccaatctctc

SEQ ID NO: 44114 - DNA, 18 bp, Homo sapiens
gggctccatcaacatcac

SEQ ID NO: 44115 - DNA, 19 bp, Homo sapiens
gtcgcaactcacatcactg

SEQ ID NO: 44116 - DNA, 20 bp, Homo sapiens
tgtcgcaactcacatcacta

SEQ ID NO: 44117 - DNA, 20 bp, Homo sapiens
agttcttggaggcatctcat

SEQ ID NO: 44118 - DNA, 15 bp, Homo sapiens
gagcctgggccaaat

SEQ ID NO: 44119 - DNA, 15 bp, Homo sapiens
gagcctgggccaaac

SEQ ID NO: 44120 - DNA, 23 bp, Homo sapiens
cctaagaggctggaaagatagag

SEQ ID NO: 44121 - DNA, 18 bp, Homo sapiens
ctctgcatgaaggaccct

SEQ ID NO: 44122 - DNA, 16 bp, Homo sapiens
ctgcatgaaggacccc

SEQ ID NO: 44123 - DNA, 21 bp, Homo sapiens
cagtacctgccaaaacagact

SEQ ID NO: 44124 - DNA, 22 bp, Homo sapiens
catgttccgagaagaacagata

SEQ ID NO: 44125 - DNA, 20 bp, Homo sapiens
tgttccgagaagaacagatg

SEQ ID NO: 44126 - DNA, 19 bp, Homo sapiens
tggtggaaggagggtatgt

SEQ ID NO: 44127 - DNA, 16 bp, Homo sapiens
ttgcaacctccttccg

SEQ ID NO: 44128 - DNA, 17 bp, Homo sapiens
tttgcaacctccttccc

SEQ ID NO: 44129 - DNA, 19 bp, Homo sapiens
ccaggcctctgaaaagaga

SEQ ID NO: 44130 - DNA, 15 bp, Homo sapiens
ggcggtcctgagagc

SEQ ID NO: 44131 - DNA, 19 bp, Homo sapiens
tataggcggtcctgagaga

SEQ ID NO: 44132 - DNA, 19 bp, Homo sapiens
ccatttggcccctataatg

SEQ ID NO: 44133 - DNA, 20 bp, Homo sapiens
gggtcatggtactcaatgaa

SEQ ID NO: 44134 - DNA, 20 bp, Homo sapiens
gggtcatggtactcaatgag

SEQ ID NO: 44135 - DNA, 25 bp, Homo sapiens
tgtacaaaaatgttgtcacatacag

SEQ ID NO: 44136 - DNA, 16 bp, Homo sapiens
cattccttgggctcca

SEQ ID NO: 44137 - DNA, 15 bp, Homo sapiens
attccttgggctccg

SEQ ID NO: 44138 - DNA, 25 bp, Homo sapiens
aatgaacaacattctcttcattaag

SEQ ID NO: 44139 - DNA, 18 bp, Homo sapiens
ggaagtgattggggtctt

SEQ ID NO: 44140 - DNA, 18 bp, Homo sapiens
ggaagtgattggggtctc

SEQ ID NO: 44141 - DNA, 19 bp, Homo sapiens
tcttgcctgccttgattac

SEQ ID NO: 44142 - DNA, 19 bp, Homo sapiens
aaggaggtctgcctaaggt

SEQ ID NO: 44143 - DNA, 19 bp, Homo sapiens
aaggaggtctgcctaagga

SEQ ID NO: 44144 - DNA, 25 bp, Homo sapiens
ttacctgcctttaaagaacattact

SEQ ID NO: 44145 - DNA, 18 bp, Homo sapiens
gaccctcagagttgcaca

SEQ ID NO: 44146 - DNA, 19 bp, Homo sapiens
ggaccctcagagttgcact

SEQ ID NO: 44147 - DNA, 19 bp, Homo sapiens
ggtcggtgttcgaatcttc

SEQ ID NO: 44148 - DNA, 18 bp, Homo sapiens
gagcagcaggtttgaggt

SEQ ID NO: 44149 - DNA, 16 bp, Homo sapiens
gcagcaggtttgaggg

SEQ ID NO: 44150 - DNA, 20 bp, Homo sapiens
acaccacctgaacgtctctt

SEQ ID NO: 44151 - DNA, 16 bp, Homo sapiens
cctttgctgctctgcc

SEQ ID NO: 44152 - DNA, 17 bp, Homo sapiens
gcctttgctgctctgct

SEQ ID NO: 44153 - DNA, 24 bp, Homo sapiens
ggtctctggtattaagtggaaaca

SEQ ID NO: 44154 - DNA, 20 bp, Homo sapiens
ctcatagcttgaccttcgag

SEQ ID NO: 44155 - DNA, 20 bp, Homo sapiens
ctcatagcttgaccttcgaa

SEQ ID NO: 44156 - DNA, 22 bp, Homo sapiens
actcctcatcagtcacagacac

SEQ ID NO: 44157 - DNA, 17 bp, Homo sapiens
catgccacccactacca

SEQ ID NO: 44158 - DNA, 16 bp, Homo sapiens
atgccacccactaccg

SEQ ID NO: 44159 - DNA, 18 bp, Homo sapiens
gagcttttgcagccactc

SEQ ID NO: 44160 - DNA, 17 bp, Homo sapiens
accagctcatccgacac

SEQ ID NO: 44161 - DNA, 17 bp, Homo sapiens
accagctcatccgacag

SEQ ID NO: 44162 - DNA, 17 bp, Homo sapiens
gatccggcttccaacat

SEQ ID NO: 44163 - DNA, 20 bp, Homo sapiens
ccggctggttttgtaagata

SEQ ID NO: 44164 - DNA, 19 bp, Homo sapiens
cggctggttttgtaagatg

SEQ ID NO: 44165 - DNA, 18 bp, Homo sapiens
ggcctggtttgcatagtc

SEQ ID NO: 44166 - DNA, 16 bp, Homo sapiens
cctggggcaggtacag

SEQ ID NO: 44167 - DNA, 16 bp, Homo sapiens
cctggggcaggtacaa

SEQ ID NO: 44168 - DNA, 19 bp, Homo sapiens
ccatccactgcttgaaaag

SEQ ID NO: 44169 - DNA, 18 bp, Homo sapiens
ggtccttgcaagtatccg

SEQ ID NO: 44170 - DNA, 19 bp, Homo sapiens
tggtccttgcaagtatcca

SEQ ID NO: 44171 - DNA, 22 bp, Homo sapiens
gcactacagctgagtccttttc

SEQ ID NO: 44172 - DNA, 18 bp, Homo sapiens
gcaggacttccgtgtctt

SEQ ID NO: 44173 - DNA, 18 bp, Homo sapiens
gcaggacttccgtgtctc

SEQ ID NO: 44174 - DNA, 20 bp, Homo sapiens
acagatgccagcaatacaga

SEQ ID NO: 44175 - DNA, 16 bp, Homo sapiens
ctccatcccacagggt

SEQ ID NO: 44176 - DNA, 15 bp, Homo sapiens
tccatcccacagggg

SEQ ID NO: 44177 - DNA, 21 bp, Homo sapiens
cgcttgagaaaattttgtctg

SEQ ID NO: 44178 - DNA, 26 bp, Homo sapiens
ttattgacactttccagtaaataatt

SEQ ID NO: 44179 - DNA, 26 bp, Homo sapiens
ttattgacactttccagtaaataatc

SEQ ID NO: 44180 - DNA, 25 bp, Homo sapiens
attaccatggcttaagaactatctt

SEQ ID NO: 44181 - DNA, 19 bp, Homo sapiens
ggattgtgtcaggccttac

SEQ ID NO: 44182 - DNA, 19 bp, Homo sapiens
ggattgtgtcaggccttat

SEQ ID NO: 44183 - DNA, 20 bp, Homo sapiens
cttggttcgtgaagaagtca

SEQ ID NO: 44184 - DNA, 22 bp, Homo sapiens
acagatccatttcatctaggtc

SEQ ID NO: 44185 - DNA, 22 bp, Homo sapiens
acagatccatttcatctaggtg

SEQ ID NO: 44186 - DNA, 19 bp, Homo sapiens
ggctctgggaatttcacat

SEQ ID NO: 44187 - DNA, 19 bp, Homo sapiens
gagaaggtgggatccaaac

SEQ ID NO: 44188 - DNA, 19 bp, Homo sapiens
gagaaggtgggatccaaat

SEQ ID NO: 44189 - DNA, 20 bp, Homo sapiens
agaaaccatcatgctgaggt

SEQ ID NO: 44190 - DNA, 17 bp, Homo sapiens
cctctgtgcagctcctt

SEQ ID NO: 44191 - DNA, 17 bp, Homo sapiens
cctctgtgcagctcctc

SEQ ID NO: 44192 - DNA, 19 bp, Homo sapiens
ccgggagatgaagaagaga

SEQ ID NO: 44193 - DNA, 19 bp, Homo sapiens
gaactgcaacacaggatca

SEQ ID NO: 44194 - DNA, 18 bp, Homo sapiens
aactgcaacacaggatcg

SEQ ID NO: 44195 - DNA, 17 bp, Homo sapiens
gacctcgggacctcatg

SEQ ID NO: 44196 - DNA, 19 bp, Homo sapiens
catcatggtgttcttgcct

SEQ ID NO: 44197 - DNA, 18 bp, Homo sapiens
atcatggtgttcttgccc

SEQ ID NO: 44198 - DNA, 26 bp, Homo sapiens
cattatctgaaatgtttcattgtaga

SEQ ID NO: 44199 - DNA, 18 bp, Homo sapiens
gctggtcatcctcatcca

SEQ ID NO: 44200 - DNA, 19 bp, Homo sapiens
tgctggtcatcctcatcct

SEQ ID NO: 44201 - DNA, 19 bp, Homo sapiens
accgtcctggcttttaaag
